United States Patent Application Publication US 2022/0211063 A1 - sequence listing, part 43

SEQ ID NO: 113 - DNA, 233189 bp, Penicillium roqueforti
  misc_feature (10464)..(10482): n is a, c, g, or t
  misc_feature (32280)..(32299): n is a, c, g, or t
  misc_feature (34331)..(40651): n is a, c, g, or t
  misc_feature (41671)..(47862): n is a, c, g, or t
  misc_feature (53525)..(53788): n is a, c, g, or t
  misc_feature (86705)..(86723): n is a, c, g, or t
  misc_feature (112656)..(112860): n is a, c, g, or t
  misc_feature (199077)..(199285): n is a, c, g, or t
ggtcgtatgtggtggcggctcgtatgtgaattacgttatggatgggatagattcgtttgacttatggaggtttacacattaacggggtcgattttaataggacgtagctgtatgcaactaatagttactagttgaacctcagaatgcaagtagatcagcacaattcagttaacatttcccaagacatacatatttctcggccaaattgaatagagcgatagtcaccgggaaaagattccccaagtggggaaatttcggctattgcatgggtagctgtcagcaatcgagaaccctggaaggaacagttaattacatacacagattgcggactcccctccacatcgactgtttttgcatcccctctcaaaaccatggcgcatgacaatctgagccccgaagagatcgaaagagcatcccagcttctaagtgcacaagaaaaagccgtcgctctcttcgaggagatcgaacgcgatttggtccgaccaggaatcaccgaaaagaccctaaatgccgaaatctaccaattaggactcgatcgctatggtatcaagacccattggcacaaacgagtcatccgcagcggaccaaacaccttgagcccgttcaacgataaccctccggatcgtgtcatccagccggatgatatcctggttgttgacctggggccggtcttcgaagcctgggaagccgactttgggcgcaccttcgtcctaggagatgatccaaataagaagaagctgcgggacgccctggagcccatctggaacacagtcaaggcaaaatatcgcgagaacccagatatgtcgggcgacgaactatacaatatctcctgccaggttgcgaaacaagatggctgggatttcggcgcggatattgcgggccatctcgttgggtcgttcccgcatgaacgcattccgcgggacagaatctccctgtatatcgccaagggcaataatgagtcaatgggtctgtcgggccgtgatgggttcaagcgtcattggattctggaaattcatcttcatgataaggcacgcgggtatggtggtttctacgagcaactcttgacggttgattaggctttctgggatgtttctatgcaagtcatactacttattgcgatggacgcaattcatggattcctcgctgttgctttccgttgagtgtactatgtatgtctttaatgcggcggacataattcatcaagaccttcttctaacgcgtgaaagaaccgagcgccttgtttaagtatccagacagtgcattcgggatggttctatgtgcagttttaggatatgccagattgataggcctttaatttagccctcagcctcgtaggagttcgacttgtgcttgggctcgaacttgaaagtgtcgggtgcaggacccaggaacatttcactgtagtatcaatgaatgattagttaatgagtcaaaaacgttaatgaaagaaaacttacgtgatcttgatccagtccttgtagtttccactgcccattagcgtctccaactcattgcggccgcgccaagcaggaggtctgtcctgaatgttaggagggaggtgctccaacagtccaattgggacatagcgataggcaaagctgagccactctagcatgaagcggcgggttgttccaacaccatgctcatcagagccccaggcctgaagaccgtacttggcgaacttttcaatataggccagacgctcagtcgcggacttatccaaatactggccggtttgaatttcctcaaagatccatggcttgatcaaagctccacgagccaccatcacagagtccacaccagcattgttgacgtggtcatcgtagtcggtatgcgagtagcagtcgccgtttccaacgaaataagtcttgccgccattgggcatgtggcgggcatctggttcacgaatggtgtcggtcagtgcatcctgcttcttgtttaggcgctttatgagggctgcacagtctgagatgtatccccagtctgcttgtcgagtgtagcgctgctgtctactacgtccatgcagggtgatggctgcggcgcctggggggcccaggtccagaacactagattcatatccaccaagaaccatacgctcaaccagcttctgggcggtaggttggttatccttggttcccatgcgaatcttgacggtaatcggaatctccagcgagacagtgttcataccgcgaatcatcttctctaatttggagtgatgatcaagaagagctgagccagctccatcacggaatacaagctcaatggggcagccgcagttcaagtcaataacgcgcaggttgggtgtaaacttcgacaacacctcagtagccttgagagcttgccatggcttgttggcggcaatttgtgcgccgaacttgaaatctttggagttatcatagccctgaacaacattgtcgcctgggatgacggttggcggtgtcatttccgactcgtgcgccttcaacagggtccattcggactttgagccttgaatcaaaggcatactcatagccatctctgagtatgtaaactgcgcgcccaggtctgtacagagtcttcggaatggcatgttgccttgggttgtgagaggtgccagaacaggtgtctccggtccaaaataaatgcgacgcttctctgacggcatgaagggaggctcaaggaactgagcacggttctcctgcaggtcgatcttcgcctgctcgtccggttcaacaagctcacccttctcgcgaatagtggatcgctggtggatcgccttctccaattcggcagacacttgaacggaccatgtggtgtaggcatcagcccggggggtgtcctcgcgctttctcgtaagtgccattttgtcttgattggaaatgatgttgacaattccctcgggtgtggcgtgggccacacgaggccgagctttctccatacgttctgcgtcctcaagcaagatcaattctttcttgccgtcttcagtctctctctcggttgagtgtgagccaaccatgcgacatttccagccggaagagcatttccctagcgcttcgtagacgggacacatgttgttcagggttgtgagatcctcgcgtttatggtctttcaaataaacacgcagatcgtgctcaaatcggcatttctcgccatattggcactctccggcggcaaattcgttggcgaacattctcgtgctgcagagacccttcgcatctttagatgtaccgtaagtgcgattggtgttctggcccttcttcttcttctttcccttgtccttcttgccaccatcacgatcatcgtgggcagcgccctcggcggcatcatcagtgttagtttcatcggcagggcgaggcttgggtgtgatatgaatgcgatacctgattgatgaaagttagtacttcataatcattgaggggtagctggacgtactctgctttgataggtgcaattcctctgtcgcgcatatctacctgggcgggttttgaaggttcatccaatcgtgccttcttggctggaggctcttccacatccgctgcgccaggatcatttgcggcgtcgcgcttcggaatctcattgtcaggcgtagcaacattagccactggggtttgggcctgtatagtctctggctccattgtatttagagggaaaagcgaactgttcactaaacttcgcaatcgctatcggaggaacattcagtcaaaatttcgaatccaggctattgtttgcattgtttgcattcaatacaattggctcggtaggtttgtggatccttttctataacgggcaagcgcaaacttaaatcctacaaccccgctcattgccttcggcatccaggtatctccatgctcgacaattaatcaatcaatacatcgataccgggacaaataccatatgtacagtatgtgccgatgcggccggattcagccgccccctcgatcgagtttggcgtcccccccgtttgggtttggtccatcccaattcggtttggcgccccggactatcctcaaactggcatctgccatctccgaccgcctgccagcctcaccctttacactaggtatataacttccagtgcgtcgctcgatcatcctcctctctttgactgactgtactcttttctctcccgtcatgcccagccgcgaaatgataccgtaattttggatcgcacggcatccttccccctgcacctccctatttcagctgagtttctcgacatacctccaggggcttcaccagtccccttgtccgggatggcaacacaaagcccatggtttctgcgtttcccccctgaaatagtttcatccattgtgtcctttctgccaaataaagatgtcaagtccttgcgcttaacgtataaagccctcggcgagatttcaccattctcctcctcacgtgtgtttctttccgccaattcgttaaatatccaagtttttcgggctatagtagactatctaaagtttcgccacaaaatcagggagattatctaggataacgcacggtttatactcgcgccgttaatataggaaactatatacctaagcatcgaccccgaatacatagaaatcaactcgactaagggatatcctatctagtttatagaggaatacgaagagaaccgctataggatgaagtatcagaaatactgtaacgtagaccgacctaaccatattatacattagtaccagatagatacctaaatgccgttaaaagcctattagaagtattatcgctaactataggataatcagatatctataatcggatccaaagataataaaaaagcctttctttatagcctagagcgattcctatagcttaagagagtgaccgttacgcctacggctcacagctagctgtttactccgctatataagatacctataatccaagcatttctatatagattcaactatccgattccgcgaggatagtactatgatcccgttaattatcgggttatcgagccgctactatggttagaggcaaccgaggactataaggagctatagagaggggctcaaattgttcttcgccttttattataagctaagtataatatttccgagctaagcttcaactctaagcaactctataccagactaaacttttggattttcgaccggccctataaggaatacaatcaatttacggctatcataaaacgtctaggcttctggtatctttatctatctttactcactagtagtaactgggtaggattccaaagcggattattctatcaagctatgagcctggctaaggaattgacctatatccatttatcaactacattcaatgatagatctcattctttaataagtgttgaatttcgtacagcgtaatttaccactagaccataacaaaaaccaaggttcttgtttagggcctagaggggccatatcccattcttgacaataaggaatctacctattcccctaaaggaggttctgcctattaaggagtggccgaatctatctcacttagcgctctctcgtttcagcgttaatacatcggagttgatagatatactcaaattggcaccatcctcattacaatctcttgacttagaatttatcgagttcccctctgatgaattgtgtttaactggtctactggagaggatgtgagaggaactagattggactgagagatcaaccgtcgaaaccgaccgttacgatcgcgatgggaggccatcgcatatggccgggggggttcatcaaactttcaaacgaggtagcaagctttatttatggctctggagaaaatcccttggatggaacagatacacgcagccccaaagacggatacgggacgaatcatgacctttttgaggcggagtacactcggcccaacgtcaatttccaggatcttaggaaactgggaatcatttgttaggaatgctacctagctgaccccgaacctgatgcattctgacgtgctcactgttgccctatgcagtttgtagacctttctgtgtggcattccttccctttctctttctcctctctggcagacagcttgccgcgtcggcgttttctttgtatgtctgcagagatgcttcttctgtgttctggtggatggattctggctggctttgtggtgtgaagctatatagacaagcttcagtacagtagctagtttcccatcttccatcaaacttcatctttctgcctctggctgatcactccattccctcgtagtcaggacctctcatcagagccgaaggtttgaatgtcttgcattgagttttaatcttggaaccttggaaggttattaatacccattcgtctattcaaaaaaaaacctatcaatatgtatcaagacatgtccaatctgttacatgctgcggtttctactcgtctatcaagaccgagctacttccctacatatatatactgagtacctggatagatctcttgcgatagttatggtatccatcagatattttcttgctagttaaccgactacaataggactgatagcatctgataaataatccagatggccttttatatctattctcattgtgcaatccaacaaaccaaacctcgtccacatcgaactttcacttccaccccaaaagcaacctttgctttgttactatatgtaccctcaaacatacaattattccacttcacttgggcgcgtaactcagtggtagagtgttcgctttgcatgcgaaaagtccggcgttcaatccgccgcccgtccatctatttttgtccgtttcattttttgctcgcaaagccggtgcgatcaggcgagcgccacctccattttgcctagagtatgattatgaccttgattattttacgtttttctaagctttaatttctatatatgtctcgttatatgacttgcttgaatttgggtgattggtggacttactccaaatataaattgtacatattcaacccctaaccttttaataaaatcaattttagaaatgaaagagaagatactttatagcgtctattggggacaatcttacaagagcaacgaagaagataattccgaggaagtaatgaagatgcgagaaatgacttactatagtttctgaactgtccttttattttggtctgtctcggtttttaatatctagagcatatctgctgcacttgttcctgagacggctattacctttgaccgacttttccatatataatatgtgtgagcagagtgttgtcattcaattgatgatattgtacctcactccataaagagcaaattggttgtgatatgtggtatcagactctaactactagctccccatcaaatccaggtgcctgagaaaagtaataaccgcgctgattactgaccaccatcttcttggtactctcctcaatgtaattgacattgaagtgcgtatgcccaaacgcccataattttacgagcggactcttccagacctcctgcctagagagattgctggcaaagcccgacgacagcgagctgtttacatgccttggatcaaccgcccgcggatcctgagtgactgggctatgatgtgtaaaaaccacgagcttgcgatgcggctcagagctagcgatatgagaaacctgtctatttaaccaccccaagtctgcatcatgggcagctgtgtggtcgtcaaccgtccagtcttttatgttgtaaaagtcattgagaccatagctgacgtgctccttatgggcctcgctcactcgcgaaaaaagtgtgcaccctaggacagtcacttctggtgagaggtcgtagcgagtctgatccaagaagacgaaagaacccatagtttccggatgtccatcttgttctgttgaacgccgacgatcaacagatgccgaaaattgatgaaggagtttcttcgtctcctcccaggttgaatcgtagggctcatggtttcccaacaggaagaaaacgatttggaattggcgcaactgggtctcgatgaatgtaatgaagcctgcgtcattgacaactcctatgtcacctaggagggcaagatatggcgccttcggggagatattgaacacatcataggcagacggattttctaaatgtaaatccgacaatatctgaaacgtggacatctggccgtacaccgaatgaggcaagttttgctgatgttatggatgaatgtctgggggggcgatagtcaccaaccaaccagatgcaatgccaaaagacccgccaagtgtggctaagttacatgtggcggtgcggatatacatagtgtggcgtaacacagcctccttccctcagttgtctaagcgcccagacatggatgatctcataggaacccctccttggctcttggccaagaaaatatatttatctccttccttcccctatttcaacgttcctgatttctttgttccgaggttgtccttagaggcgttcctgagcttctttctatcagcttatcaactattgtcacacgacgtcataaccgcgttatcaacaccttaatattgcgggcaatattgaaagacacaagatagcgaccaacacgatggcgagcgcagcacacgatcccagactgctatacagcgtcaataatatccgtgctttccacatccaagatggcgaagagcaggacctcacgccgtccggcgctcaaaccctatcactgctaatggtccccaccaacaccgccactgctggccctgggacagattggcctgaagattcaccggaagaggatttctatcttcacctatacatcccacctgagctcgatattgcgatcccggcgaccacacagatcttccaccaagctcccgacagttatctgattccccgctgggacatgggtcccgaagctggcgctttcattcgcatccagttccctagcattggaactggccctagcaatgtgtctcaggatgatattgatacctttgaatctatccttgcgcagtgtactgcattcctcgagcgcaccccgtacccgaaagctcaggactatactgcttacaacccggccgactacgcacccggcgagggttatgtcgggacacccgatacaaagcaaggagatgcacatggaagaattgtgcttgtggacgaagaaaacggcagtgtggtcggagagctaggagacggctacaatgtagtcgaggatgccgacgtgaagcctggctctaagagtaagtgttgaatcatggtcacctgtcaatcagcaactgactaatatcgaacaggaccggtaggaattgaacttcctgcagaaggcggaggcaatcaagtcagcgtcagcaatgtctccgaagaatacctgtcattggcccggcatccggcatataagaactcgacactcgttcagagttcggctacagcatctcgtctgatagtgactggatcaacatatctggcaagtgctattgcgagtggcgcggagaatttccaaaagaagacacagccgaaccccaagcctttgaaattctcagacgctacccacgcgcgcattcgcaaggtcggcaatttatccaacggagcagcagatatttctgctcgcacagtcggacaggtcggaagagttgcacagaacataggcgcgtcactggcacgcaagcaagaatctggccggaataaaggcttcgacaggcgcaacccaccaccagaatacaagcccggtgtgttgaacaaatcaatgatcgcatttacaaccctggccgacggtatcgagcagagtgcccgaaacatgctattctccggtgctggcgccgccagctccatgatcgaacaccgttacggaaatgaggcaggcgccgtggcaacccacctgacgggcggaatcaagaacgttggattggtttacatcgacgccaccggtgtcagtcgccgcgcgctattgaagtctgttgccaagggcatggtcgttggaaagatgcgcgatggtcaacaggttgtcgtcggcggtggcgacggcggccaggtaccggctaacgccgtgcagtctgcttcgggcccttctagcttgggtgcccgggaccctgttgtgcggcgtgcgtcgcctacccccacaccgcctcctgcatatggtgcgtcggggacaaggtccctcaagggggggcccacgtcagggggtaagcggtaaaatctgggggctggcgctagttacagtgcttggaggagcgagatctcgtataggagatgtttgggttttttaatttttgtgatttggtatgacggacatgatttctctttttgcaagctcttgattgaggattgaggctggcagcttcttgattttcctattctacactttttgatacctatgtacttgatttcctctcattcttggctttccccttccgttttagtgctcagaccttgccgctccgcagccatcactggattgatcttgttttcggcagcaaacaaaagggcgaggcagctgtcgagtctgtcaacgtcttccaccatctctcatacaaaggtgctaaagacttagatgctatttatgacccaatggaacggttagccaccatcggcattattcannnnnnnnnnnnnnnnnnngcaaactcctcaccaaatcttccaccgacctcacgcccaggcctatatttagctaccaattacctttctctttcagttgatcggatcctgtagatgcatggttataatcagcttttcttgtggattatcgcttcttttcacttactgaatgtggcggatccatcgcggggaatattttgtattatcgtttcctggccaaaccctcgtcacgtgtcatgttgagttgtgatccatgtcaccatcctttaagaaagttcctcctctttgtttgctaaagtgaaaaaaaaatccaaactcctcttcctcctcctctagccttcatagcgacgatggctggtttttacttcacggaacaaaaattggaacaatgatcttatctcgtctatttctagttttctagactcaataggtatcccaaaccttctttggggtcaactatctacttactgtttatggagttcctacgattgtggatgtcagtattttatctcgattgaccggattaatctactaatattccaataggaagcagcttttgttattccggatgatcttacccaggtcgcattctcttcacttgagagtgctgggtttttaccctgtaacagcttaggctgtccgcacttagatacaaaccgagtgccaccggaatttaagcacctgcatattaatgatgaggttgcggtctcgctctatcggaaatctgatgtactatgggagtttgacttggagaaaaatccagatattatgattgcgtcggacgatcgactcccgtcggcatctccaggtcgtggccgaggacgcttcttatcgtgtccttgtaccgtgaaaatccattctgctgtgagatattgtgaggccctgattctattactttgccgtgactacgactcttcttatgagacttattggctagctattctgagctatatgttggagtatgttgacggtacggatatcttggatgaaaacaagttgcaagaaggttatagaaagttttaccatgccctcaaaactaggagatcaagagatgtatttaatactggatgagcttcgatttgcgttgattgaagagcgtcccctcccagtgatagattattaacaagaccgggctaataccccaagacacaacaagagacacaaataagacaccaaaaaagacaccaaagaagatatagcgcgttgtcctttttaaccttgccctcatgtagttattcaggacgtttgctgttgccttacgtaatataacttcaattctattggctagaaatgggacgcgccccaatatagtagcggccccacaaggtgcctacctagagagtatacaacagtaaagtcggggctttccactttctgtttctttcctctcatcatcactctccatctgacatccttttatcatggaatcacgtattgaagatggtcagccagatcctctgcatatcttttcggagtttgaagaccccactcgtcatagcctcatccagcagatcgttcaggatgacccaggattggccatgatcccgcagcagaatctctatgccttatggttcagtgatattagtactctacaggagaaggccaatgcgcaaaccaaagtcgcgaaaaagctccgcgcaagagacttgagggtgctctccaaccagtacgatgttgttggtatttgtgagtggatctacaagttatatctacaatattaaactaactattcttcaggggcttgtgaggggcagactactgcagccagcagagaagaaccccaaggttctgcgcctcggctgggtcttagtgaacgcggtcgatccagctcgcccaacactggctcctctagcaagccatctacgccagagcacgagaacacggtggatgtgagtttatcagaaatcacaaagaggaaatagtgctaatatggccttctagctcccatccgagagtgctaaccgtgatggttatcattgcgtagtgacgaagcgtggactaccattgattgagagtgcccatatcataccgaaaaagctcaacggtgctcggagtctgtacctcacgcaatatgagtgctgggcctggcttagtgctttctggggcgatgagaaagtcgacaggctgcaaagcctcttggtgtctgagggcataatggacacggagcgactttataaccagatcactctggatatccaggtgcagaaatattgggatcgtgcgatgtgtgcactccgccctatttgggtcagtgaagaccaaacggaaatgcaaatcgcgtttcattggctgcctcttcaagagaacctcccagagttggaaaatacttatcggggtgagatggtctcggttatggagaacccataccaggatccaaagtaccgacctcatgagacccctgggaacaataacttcattttccatatggagacgggagttagaatcccctcgggatatgtcttcacggtcaagacggacaataagtatgaacggccactgccctccatggaacttttggaactgaggtggcatctgtctcgcattgcttgtatgcggggcagagacgaggacggagatggtgcttatgagtctgatggtggcttttccgtccgttcaggctctcgatcccctatctagaaagaagttatgctccactcgaacatatctttccgtccagccaccaagccaccgtcgccctcaaagctacagaatgtgtctttcgagggtgatttcagtcccttatcccggagtggtgggatcttttcgcactcttgacggagtgactggtttcggtttgtcttgatactgatatgttagaataggatggacgtatgggttaggcctcatttcgcttaggtgaggataacaatgcatgttctgaatctgaccttcgaaaatatgtaaagttttcgtctgattcctatatgagtgacttccggtctttctgcgaccggggtcttccatgttctggaagatccaacagccatgagcttggacctctgctgctgagatgcgaccgtttggatgccagggtagacgaggcagatgtaaattatgctgtctgtcttcgtacagatatccattaaaatgaatttccaaattagagagtaaattattattcgagaaatgactcccaacccaaaacggcaaaccaggtacgcggtttacttcataaacaactaacaaacccaagtcactcctataaccagaatttgtccaaaaagcatattcaattcttgtttccaacccgcttttgcattgttttgcattttcgggcttatggcgagggcgaggatagccattagacagggttgctcatatgcgttgccagctgccgctggacgatctatcggatattgattgggtgatggtatacaacgttgtagaggcaaaaactgccaacgcatcgattgacagttgtccacggcccaccgtggtggctttgtccaatgagggcgatcagcactcacatgagtatcaagtcacaaacgcttgacatttacatctggagtattggtgatccgggggctgtcagaaaggtagaaaagcagtggaggatttagtggattgagcatcaattactccgtactgcatgcagatatgtactccgtatattgatggagacagtgggtaagtggatagcgtaaggtttagtcttgcaggccggactatccaggcaccgcatcgagtggtgtgcactccattttccggaccgagatttcaggacgtcaaggttgcagttggatataaaactcgagcagatcgggatccgaccatggttcttgccatgcttaccgtggttaggtggttccagggttcgggctatggcccctcttcaatctgcgtattacccccatacggagtccttcgtagcttcaaagcgttaaagcccgaagcgagagtccactatggtgagcgctaattgtcaggatcaagctagggaggtgaactactgcacgctattcttatatctaatctctggatctttgagtctgggattgatcaagtcaacaacattgagtttattaaaaatataattaatctcgtagtaacattgatttaattcagatgcgtacctatgtaattaggctggaccaatgaagaaggagaaaaaaaccgagatctgggcttccgttctgagagaggctaataatgacgatcgtcccaagtgtccactctatgaggattcgaaacagccggtgcaaccccctatttattattatttgcatctttcgcttgaaaccgagcaatttagcgcccggtcatgctactattatttcgggcttatccacagaggacgtcgtaacgccatacacttctctcccttctttggcacatgcgaggatttctcgggactcgagccctttttggcaaaggttactggcgcaagggattcgagatcaatatatgggcaattaatctatccactcctcatacaggatttagtttgtctttgttgtcctgatgtatcataacagtccttggcctatgtaccgactcggtatatgtagtatagcttctctattccagatcgtagcaagatacaacacgatagtcccatccatagtataatatcaagtagctcgtagacttccatgtaaacatccccgtatcatatcagtcaaaccctcatccaaggctcaagagccaaagacccgcctcccccagactaacagaaactaccagtcgtatcttacctcctcttttttccttcttcaccttctcatccggcctctccctctaccctttgggcctttttttttttcttttggtctgtgttttcttgtttctttgattctgttctttgggggtctcttctgccccctttttcgactcggatcccccgaccggtgtttcccgtctttttcctcccctcgcgacccctgtccgcgcccctcagtaatcctattttcgacaatgttcatctgttgtcgcaattgaatcagagttctgttgatcaggtccgcaatcgcgtccgagacatttgttaccgcgtttgctcgattccttggacaacgtgcgaccgcaaaccccaagtcgtgggtctggaggggaactcttgaagtactgcagcgcaggtatctttagctttcctttcgtttttcgagaaacttgttgtttttcgacgcgtcttgacacctgaacaagctcgcgacctggtgtcctcggtgatattcaaccatcatctaacggtttttgcgcgattggtcgtaagctagtccccccccattcctccgatcggatctcctgctgtcagttgtccacccccccattcttgggtgaaaaggcacatttttggcgattatcgataagcatctggggaaatattcaagctgacccatggcccaatgtctacagatcgcgctttgcagagtcatttggcgagtgcgaccggtcgccccaacctcccgacttttgccaaacacccccgggcattgtgttccctcgcgccaattgtgccaatcgcaattgataccagaatcgtgtcaacgagtgcccgcagaagctgcctcggaccgtcacacagcaagtctcgtaaggctttgcgcatctactagacaaaggtatgctatcggccgtgatgcatattgcctcacagcgcgtacccgtccgccaaaccattcaattcgataaataggttgctaatctccaaaagccgtttctgaggccggtcccgaacagctttttccggctatgagcacttctcatcagcaggccttgccactccccgctcatgcccctgcagtatcgaccacatcatctccagcccagaagaatgcgcgcgcaccctatcccgacatgttaggctcaccgccggttcctcccccgaggacctcttccagtcgccgtactcagaatgaaacctctacagagaaaacgagtagctctcgacaaggcaagagcaggtccgatcgaaaagacacccgtgatcgtacgcgcgataccacgcgcgatgaccgaaatggtagatcacggaggcagcctgaggacacatctcgtgaagtacaatcaaggacggagtcagaagtggacatccctggccgtgtaaaagaaccaagcgcggaggccaagtccgtgctgcctagcgaccatgcaatggacgagagagaacgacccgccacagaaaatgcctctacgggtagcgccgaagaggaggctcgtgggcctcgaagtcggcatgattacaataatgggaacgttgtcaaacgcaaggaaaccaccttcggctcgtacattctcggacaaaccctcggcgagggagagtttggaaaggtcaagctgggatggaagcgcgatggcactctccaggtagcaatcaagctcatccgaagagacacactggggactaaccccagccgattaccgaaaatctaccgtgaaatcgccattctgcgtgagctggcgcaccccaacattgtgcgcctccacgagatggtggaaactgaccgtcacattggtatcatcatggaatacgcgtcaggaggtgaattgtttgattacatcttaaataatcgatatctcaaggataattctgcacgccggctgtttgctcagctggtatccggagttggttatctgcacaagaagggtattgtgcaccgtgatctcaagctggagaacttgctactcgatcggaatcgcaacatcatcattactgacttcggattcgccaacactttcgacccggtcgatcctttagacgaggaaatggagtacaacttgaccaacaaagaatacgtcaaacggaagcgactagacaagattggtccaaatgggctaaggcgaggcgatcttatgcagaccagctgtggtagtccctgctatgcagcccccgagcttgtcgtgagcgattctttatacacaggccggaaggtcgatgtgtggagctgtggagtgattttggtaagttttcctacagacagaatccgactcaactaacttgttacagtatgccatgttggcgggatacctacccttcgatgatgacccagcaaacccagatggcgacaacattaatctcctttacaaatatatcgtcacgactcctctcacattcccggaatacgtcacgccacatgcgcgcgatttattgagacggatactggttcctgatccccggaaacgtgcagacctgttcgaagttgcccgtcacagctggctcagcgagttctcgaatgtcgtgtctcatatcacaagtagtacgacaaacgttgtggacattgcgaatacaacgatcccatctggtaaggacttgctctctgcgggtggtcaagattcgaattgctcacataagtctatagaaacccaaaaggaagcaccgcctctcgtccgtagtgcctcagtgcgcgaaccacccaagacacatcagcacgctcctgcggttggtggcttgaaccatcatgccggagatgtttctcaagacccgccgtccgaaaagtctagaacaccccgtgatgccaagcgaagaacggtccaagtcgaatacgttgctcctcaatcacaaacgacccgaggagaacctccggtggaaacatctgcatcacgcagccgagtcccggctccatctgaggcccagatcgcagcttcagcgcaacaacccacagagcctgcaactgcaccactcaacctgaacaagccacttccagggcacttgccccggtcggcctcggaccacgcagccatgacgggttcgcagacgagtgggatgtcgcaagggcatcgaccagccactggtacttccatgagctcctttggaaacactggtcgtttgccttctcgcggctcctatggacagccggtggctcctactgttaccgcaactaacacagaaggccgcctagcacaacccaagagcaggcaatttgctcttccacaggatcctgcacaggcatcgagcacatctatccgtcgtgcaagcacccagaaccagcaattgcctgcaaccttcaacactactccccgacaagagccgccaaaaggccacaagaggtccaatactgtttccagcctgggcgagaaactgttcggtcgttctggatcaatattgggtggccgttcgcagtcgaatgccactcgtacaaagcaagacaagcgttatcctcctgtcagcatgaaggagcctctaccgagggaaaactccagagtgtctgtggattcccgccgctcgatgcaatacccccataaccgcaagacaagcgagtctggcgcggaaaaccgtcctcgtcgattctcattactcccgcaatccttttcatttcgcggtttctctaatacccgggctccgactcccgaagaaccctcgcagatccctcgtcccgtggacccccgtgtcccgcaacgccctacctcgggccctgccggcccctcgcagggtcgttctcgggcgacaagctatggcacgcaagaagctatggggatagttgacgagggacccggcgaagatgttcataccgaacctgggccgcttagctacgaggcccagattgatcaacagtttgcagacctaggatctcaatttgactatcagagtggttcctttggagtcccctcacctgaggaagtctaccagaactctgcagaccgcattgatcaacaaaatcactcatctaaaccaaactactacgatgattacaatggcccatatgacagcgcgcctaggcagtcgacgcaggttggccggtcaggccgtgggccgggtgttttgcagaaaagccaccgcaaattcgcggacgcctatgaatatgagcgcgacgggtctcaccattccggcagctcgggggctgcacgcaaagtcatggacttcttccgaagacgcgccaagtcccgcggcggcgatgaccgttgattttcggtttagccaatagataaaaagcaatattccatctcaaacggactgaccgcggagattggaccgatcaagcactcttgcggtttgagctttgatcttagaagccgattcaaaccctatcattctgatgcttcttttgagttgcttgaaagagcagcgaggttgtttggataccccgtgataccctgcttttgttcccttcttatgcatggagcgattcctcttcatccgtcgggtgtttgattaattatctagcattttctttatttcctttgtctagctacattttccttgctcctaatgtttcgcttttgttcgctgttccccccgttttacctcaatatgtgatttgcattccccttctactgttactattatctctggctgtaaagtgagacctcatccgtgttcttgttcagaacattttattattcttttgaaccttttttttcgcttctcattgtcccctcttagcttttatttgttcctctacgagaggctctgtccacgataattcaattgtgacattatttccattcttctgtctatgtctatgtaccttaatgtgtggctttgtcctttaaggtggatgtttctggagagttattcaggccttcctattctattgctactctgttactctattactagactacaacaaatgtggtcagtacactgttacttgggaagctccaatatacctcattatcaagcggaagactctatatctcccttcagctgcttgtagttgatgtagtgtaacatgattaacatcagaatacctattccagggtagatactttcaaccgctcaaccttcaccagatcagcctccctattcaagctctcaatctcagccgtagtaaaaggaatgccctccgccaaccgtttctcctcggtgatcatctcaatctccccagggaagtaaatccgatccacaccatccatcctctccgactcaacaacccgccgatagagataatccatcctccccttaaactcctcaatagtcataaacaaatccggcttaatagcgaccaaaaaatgccccacatccgccggcctcgacgggtcatacgggttagtaacatgacccgcaaaagccgacccagaaagcacccccgaaaaaacatccatcataaccgccagcgccgaccccttcggcccccccatcggcaacataacaccccccaaagcctccgccggatcatccgtcctagccccatccttatccagcgcccaatcggtaggaatcctctccccccggcgcaacgccttataaaccttcccccgcgccgcaaccgaaggcgccatatccagtataaacggccttccctgccccgccggcgccccacacgcaatcggcgacacacccatcagcttctcccgcccaccccacaccggcagcgcaggcgagctattcgtaaacacgagcgacatcatgtccgcgtctagcgcttgctgcaccagccacgcagacatgccgaagtggttcgagtgcttgacggagaccattccgatgccgaaggtctgcgccattgagatggcgagtttcattccttcgtgcgcggcgacgaagccgaagccgttgtgcgcgtctacttgcgctgctgctggtgttatttgctggattgtgggtgttgcggttgggtctagggctttctgccggattcgttctatgtaggatgggatgcggttgctgccgtgtgtgtctacgccgcggaggtcggcggataggaggcatttggagattatttcggcgtgcggtgggggggtgttgtttgcgatgaggatttgtttgatgaaggtttggagggctggggggttgatgttgtgggtttggtggggttcgttgggttggtcggacattttggatttggattgggtgggtttgatgtgggattttgttgttttagaagctgggttgggtgtgggttgtcctgtagagattcttttatagacgcggggacggatgtgttgcgaaatgcggggccccacgggtttatgaggggtatagccctatttcggagtacttccgaggtttggtgggtatattctataacgaatatatggggtttgagagcttgatattgtcgaacctttcaaaaacaaaggatgttgcgcctgcctacgagatcattacggatatctattgatcctacgacatacacagtactccatactcacggtaaggtgcatggtataagccaataagaattaagtcaaggaatggccgctatgcacatccaacaagggcggtcggtgtaggaaccaacgccaatctcctcaatgcttaccccctgaatacattcaagatcagtaccccttccagcattgaattcccgtccaaatgagtgttccatcgctgcctgatgatctatcagattcagacttcggcgacgttgtgagcaccgaaaacgacgagcttgatctcgaagcaatctcagagccctggcataagtacgatataaaagaaacaccaaacgttttttaccctgtttatctcggagaagtcctcaatgagagatgtctggtcgaacataaaatcggtcatggcggcggctctactgtctagatggcccatgacctctatgataagagggacgtggccctcaaaatcatgtctttaggggactggggggagaacgaataccgcatgcagaacgaaatccttcaaaacgtgcatgatacttcccacctagtgatgtatctagggacttttctcatccctggaagcggtcatagggttctagtattccctttaatgggtccatgcattgtccctattgaaatggaaaaaatgccaatggccagccgtatgttcgctgctcgccaattgttagaagccttggaaagtctacataaagaagaattgtgcaccgtgggaagtcgacctactatattcattttccgttctaatgaacaatttatagatttaaatgagaggaactgtatgtgggggatgcgtcctctccatcatctcaataggaatgcgaaatacgaggcactcggtcggccactaaagctagctataccatatgtcgaactttgcaagaaggggtagtttgctcggccagttaaggtccctgagaatttacgcacagaggaattctttctcggtgactttggcctagcgaaaaagcttaccgatagcgtgactcaacgaggctatcccccttcgaaatattgttcccctgaacgtcttcacggggaagcgccaagtctgaactcaagtggattccttaggagtttaggtctactacctgaaaagtggaagggtctttaccctggaggactcgattattggtatgaccaatcgcaaacgcctaatccggatcttgatgttgcctctagaattgcatactttcgtcccgatgctgatccgatcgagcgaaaccatgtggcctctatcatgtccaaagtgctctaatactgtccagagaaacgtccgagtgcaacacagcttttacaggatccatcattcagggccattatggagagatacggttgttgctcctcattatttcgtttcttattcgtcctgtttcctatgctgtaatattatttcttcatgtttagtgctggaacaactgcgaagatcgcatgagtcgcttgaagaataaagtgcatccattcagcttaactatagagtagatgttggagtaattcggttaagtactccgtatattataccgatatgccgaccaccgagatctccatattagggctatatgcaatgacagagaggatagtacagtccaaaatctgatttacgaggattaccatcttcgtccaattacatctcttaatgaacataacttttcggagcgagacaaagttgtcgattgctattgactttgtactgcgctatgacatcatactcggctgtgggcggcgattgccgtgtactcggcaaacatcccaccatgcaaattcacccgtttgccgacgcactatcgaaatcgttaaatatgcaacctagggcgaatgctgtatgcacccgatgccacagtagcaaggtatgttgttcttcatgaatagctcctatcaatactgatagcgatgaagatccgttgcgacctagaaggccggcgaagtggtaaatgtagccgttgcgagcgtataggctatacgtgtcagtaagactgcgtaatgatatatatctcccgaggcctataggctgacgttataggcctcacattggaaagcgaaggagagccctccacgcttcgctctactcgtcacatacaagtatcccgtcgccaagccgagcagtccctgtgacacaggagagcacagcacaggaagcaccctctccctttcgtcatcttggccgtcgggatataacatgtgtgggacctggggatgtcaacggctcgcaacagccgaattccatcgatggcagtcagctcatcctagacataagccaagcttgtcgtcttccatcccccatcatcgcccaagcgcttaccgatttctatttccgtgagctgttctacttcgtcccagttttagatcgtgggcagtccgagatagaaacctctactttgttacagcaatgcctgtgtttcgcgggaagtaccatgcgtcaaacggcagggccagccgagtggaccacgtttgccatttacgggcggatcagaacattgctctttctgaaccacgatccagctccattgaatatgctcagcgctctttgcatcctcagcacctggttcccatattctcctgatgcgatagtgctagacaacccgtggcaatgggctggtatggcaatccgactcgcgattcagttgcacttgcacgagaatgagacttacagcagattagaggattcaggaagagcgcgcaggatgtggtggtatctctttatcaacgatacattgcagacggcctgctgtgggcgtcctggaatgtttcccctggaaacctctgtgccactgccttttcccagtgacttcaaacatgtcgatctcggatcacgcgttttctgtcagttaacagttctctgtacaaaactcaggaaggttgttgacctggccagagttgacaaggcctcatcagagcaggtgtatctgaacctggatggcctgagagtgtggagagaacagctgcccctcgaaatccaattgttcgacgtcgaaactaggcaaacatacaatcgcgctgtcgctgagctccatatattttacctagtgactgtcattttgacatgcttccttggccgccgggataacccgtcattgttcaaatacgcttcaatggctgcttcatcttgtatttcgcggctatacgaggagattctttatcacgaggatgtccaatacctactggcaatgcatacttgggctaacctcgtcgccggaatcccgcgagctttcggagacagcgatgtattgaatcctgaccgcgacgaggagctcagaatcagcaaacaggtgctggaaattatgagggagaagcatacctccgctacttttgtactcaacaaaatcaacggtctcaacaatatgcgcgcagattcggttcccgctcaagccgataacacgtgcggtgctcttccggtgtctgggcaaattcaactagctcagttgttccctttcccctcgaggttttgccctatgcttaggattctaagaactgcggaagctagcgaaaatcaaccaccggacgcgcttctcactttgcctgaagatagcaatgattggccgatggattggtcttcctttttatttgacggtccaatgagcttctaaaatacggaaatatgatattgctgtgaatactggctttaatagaaagttcatagtactaggcttactagctagaccgtagagttagattctagtgtatctattctctatttgcacattggtaaagcattcaggaaattatcgctggtatacaaacctagtaggcaaataataaatctcactattctatagaatcagtataaaggttagggattgcccccatcaaagaaacacggtctattaattcccccgacggatgaactcgatatttggtgtctcggcaaagttacggctctcgggtttgccgcttcggccattttgtgtcgcatattttcttctaggacttttatataaattgaacataagattctcatctcaaataattcctccagatcactcattagtaaagaacaaatatactatggcatctaatccgaacaccaccggaggcgtgcaactgacgttcctcacaacgggaacggtacgcattagaccctcaatgcgctcgcaaccattgagcaaaatcccgattcttcgacgtctccgagcaatttgcgacagaacatggactgagccattgccagtcggggtattcctcattcgccaccccgaaggtctcttcctcatggacaccgggcaatctccatgctgcaacgacgccggatatctcccacgactggctattttgaacggcttcctaagcgaattcatcatcgagcaccaagacggagtccttgagcaacttcacaagctcggaatcaaggcgactgacctcaaagccgtgattctgacccacctgcacaacgaccacgcgggcggattagaggatctggttgcggaggcacctgacctacctatctacatcagccgtgagcactggaatgcttttggggaacatcctctctttgcaagcatggagggagccacacccaatcattggccaaaggggttctcgccgaagattgtggacctgcaggacagaccacttggaccctggaagcagtcttatcctgtgacagaggatggtagaattgccatcgttgatacgtcgggtcatgttcctgggcatattagtctggtgatttacggcgacggggaagatggacagagtcaggttacatacttcctccctggagacgcaacatatggcttggaccttttggacaaggagcagcccgatgggattaatgacgaccctatgcgtgcttacgaaacgctgaagaccatcaagcagtttgctaaggagactgatgtggttgtcttgcctagtcatgacatcaacacacctcgcttgcttgctgagcgagtagtctaccggcctcttgagaaagagtgatcgtgtttcaataccatgtacaatattgtgttatttgagggaggaagctatgtactaatatcggactaatgtatctgaaagggaagaaattggaatattttcgcttttgtaacgaagtagcctgcataatatccgactgcatactgctctatctgtatgaatcctgaaaatctgaagccaccagctccgccgattatggaaacaacagttgccttctccacagggtctactcttagtgcggaaagaaacccgaactcggaccgagctcactgtggcaaagccgataccgactgccgacttccatctagcggcgcaaagccagtggcgaaatcatggccgaaagaacatgagccgctcgccacccggttttcggtaagaacccgtggaaatcaataattaagcataacctgaaacaataggagattagaatagccggagatttaacatattcagaatccctataacgtagcatataacgcttcacaacccaaaattccaccgtgacataaaagctcattgtaatagtcagagcgacaggcgggcaagggggatcagttatatcgtcatttctgaaagctggaggatggaatatccgtagcctgacccataataccgtgagcgacaaggcgaaggccctcgtaaagggattcgagatagtgtaggcggatatctgagatctagcgagtcttgaaacagcctttcatggtacctgtgcgatatttgccacgacggactactaggagaacttctggacgaaattctggtccatagagatcgggtatacgtaaggtaaagtagttagcaacatgcaagagaagagaaagatgatatgaaggattggcaaaactaggtgagaggaaaaatatatatcgaaggggatggcagccatcaatcaagtcatgtagctggaccagttctaagacccttctcgacgacctcaatatctcggagcagttcctccgcggattcgtattccttcaaccaacacttccatgtaatagcactgcacgcatgtgaatcctgtgggaactgctgcttttcaaacctctgttcataccacccatcttccccatcgacaatgtcaggaaagaccgaataccccatcatgatcaagtagatagtacaacccagcgcaaagagatctgttttgacatccgcatcaaaaggatcggcccgagggcaatagaatctgacgggctccccgcttccatcaagcagtactgttccatcgctcgatagttgtttcccttggaaatccgacagcttgatatgaagatcctcatcgaggagaatatttccaggctggatattgtagtgaatgatgccctgagcatggatccatgcaactgcctcggtagcctctcgacaccaggataactgctgctggatcgaagggggggcgttgtctgattcgaggagatagtagcctaaggttccgtttacagctcgctcgaggtagagccccttatcggagaagcccctgaatcctatgatgcgttcatgggacccgaaaatttcgaaaagctttttctcgagatttcgagccgactcatgtctccgccaggggcgagaggaagtttcatgaccgtcaaatcatccacttctccaatgaacgcactgcttcccgaggcgatgaccttcttcacttctggggggcagtaatgtctgtgtataataacttctgtgtcgtctaacatggcgagtcgagggaagaaaaatgttatatggaaaaggtttggtaagctcagtatttggggtgatagaattgcgagttgaaagaaaccctacaatgaacagttaaggcgcgtgatgttgctcgggcgggggatggtgcaccggacaatcgaaatgattggctggtattgccagcagaaagttggcttgatcgagtaactagatttcaaggtgtattagcttcttaataatggtttatctcctataatagttaactagataaacaatcggggtcgattctcttctagtgatatgatcacaaaacaaactaaatactgtagtagtacatctatgcgtggacagttaaaagggtatagaaagaaggaaacagtagtagcctctacgtattcgctacacattagatgaaactacatattaggggaattgacgaggcattaaatacattgggatagctaaagtggtaaactgcattcaccgatggcgagatgaattacgcagttgacagcaccatacatattggactcagtacaaaacaatttacctcagctatagtccacgcgcagtacctaatcctcacaccaccagccgaacgaagtccatcccaaaaaatcttcacagttcgtggacatgatcacgtccggccatggccttcctttcatctaagaaccgtcagtcattcaggcacttcgaattttgatctgtttagcatacgtacatatcaacgactttctctaacactttgggcatatatggcccggaaccctgacaaccgaggttgccaagtatacatccttgtatcccgtgcagttgctaccaccgggctgggggcactggaccattgcaatctcttctttttcatgctttggggtagcagtacagttttgatactttctgcgggcaatacgtcgttcgcatccgcaagccatgatgatattcagaccgtaagttgttcttgaccgaaaggcaatagaagttaaagtgtagagccagtggccagaggataattggatgatagtagagcgatagttgagcaaaagctttgtgattctcatgttgacatcggaattatgatgcctttatatattcatctcgcaaagtctccctcgagctgaggggtcagtgcagcttatggtcaacaccattatctagcttgatgaatgaatcacgaccatgtccgcgatgtattgtcttctcccccgcatgatcatattggctatctccctagtgtcatgtaaagtgttgactatgcatctctctcgtcatctagaccggatatagcctctgatacgcctcctccaattacctttcggtattcgacgagctaaagatctgatcatgtacattattggctatgactaagactacgatagaaaaccgaattacagacttttccagttgaattcaacccattccaggaatctccaaatctttccatctagttttattctctttatccggactacagtaacatataggaaagtagaatgattctaagtctaacactgtccgtccacttctctgagaggaacgccttatcagtgctccaagggactctagttctcataaaactgttctcgagagttcttcagttatccattgccccgtatattggtgaatcaacatccttctgcttctctcctttttctacgccgagtcgtatggcctctaagattggataaaccgcatctactccaacataccaaaatattcaacattaagtcctaacatttgactgcgtagacttggttggtcttggttggaattgttttccatatccaattcgtagcagtgccagcctgggggagaaaagtatgtccgctatcctcgccccaccattttgtgcccctcttcgtgagaggaaacagttactaccatcttttacccttcaattcttgagattacgatgcgagatgccttttcatcatttgacagatgctatgcattgatacccgattgacccgactatttgtgattttgaagacttgattgttcctgcctcagaccatacgacgacacacagcccattgcttctcatcaaccaaccgacacatcacaagaggagaaaaaaccaggatatacaaaagctggttacaaggtcctacatcttgcgaactaaaataacacgaggcgaacttttcgccgcggttgtgtacttcagtataatcaatcttatcattcaaagtcagtttctctttagaaaacccaactgttactggaggaattccattattgctcataattggccccgagctaacgtgccacttcagccatgatcgaccaggtgcgcaagtacaagcttgatcctattccacgaggaaatcttacaggggtagtgaaccgaaatgtatgtactctagagttggagactggataatgctaattatttgcagctaaaccgtgacgattgtgaaaatatagaatggactgcccttccgaaagcaacccgaatgaagcctcctccgaaagccatcgccgttattgttgatgtcatagaaagccaaggtgccatccacatcaccgacgatgacggatcatacattgatatggtaggaactgaatttgctggccatttggtgcttgtcccgtgggataaaagctggtttttgagggcatctggatcgattgaagtgggatatgttatcgtttaggagaggacatgatataaatcactcgataactctttgacgatttatgattaaggaatctgtcaactccctagatattgggattgtgacgaaggacgattgatatctgttgtaggggtcggttaggcgcattatgccggtgatttggcctggcatcgccgcgatttttttcagatcgtccatggagacctcataaacatcaccatgaacagaggtaagggtggcgtctttccttggtcagccttagtcacagaggagtaaagatcgtttacctcgagtcactccgtcagctagcttctcaaagacgtcgagctccaattcattccatttttcggacagcttagaaggcaaatatacgcgctcctcatctctcatgttcgcaatggcagaaggtcccaatccagccgcacaaagaacaacccctgtgtcgccgtgcttcttccttatgttccgttgagtctccagatatgttgttctttacttagcacctttcgcatccgttgaaggtcgtccatttgttaggagctgaaaagcatcgtcaactcgcttttgttcagagtctttcagataggtacggtgatgcgttaactttgagaacttcaagagcttcgccacggcctcgtctgcagttaggctttgcgaaggcatctatctgctcttcgttcattaagagataatgaaaatgattatcactggagtatatactgtatgtgggaccaagcttagatgtaatcagaaagaggcgagatctctctagaacaagtgaaaaatgcttgaaggttgttgaaatccgttggcaacagctggaaacagttgtaaagttttggccctgattccagccatgcagaaatccatggaaacttatggaaatgtcgaatcgtcaagaagaccaatcatagtttgaaatgatgaaacaaggaggcagacatggtgcatgaagcctcaaagtatacgacttcagcgatacgcgcggggtaatgagaatatctgatctgaattacctggaactataatggaaattatgattcacagaagacattgctatcgcaagtttctactttatttctttagttgtctcttccaaacaaccccagggccaaacgaatccctccgtccctgtatgcaatcgatggccgccatctgtaatattttaggagctagaaatctgcgattgagcatgtatcaacataatgcttgcgcattccgtcacgcattaacatatagcagacagaagcagatttgtgtgattggcgaggaaagagaaatgttcgttgtttcccagtctatgcgcctgacaaggaaggaaagtcaccttcagcgtgttcacgagcattttgagcattacaaaatctctataaggggactgagactgatagcttataactaaaacggtatgcaataatgttaagattacattttattactgaagttatatagttaggtgtaactagtgaagaggggacccctaaggggcaccgacagccctgtctgcgaaacaggtatgagagcagagtcgtcactgggagtagtagggtgctagagnnnnnnnnnnnnnnnnnnnnttagtttaattaatttaatggcgttttggttgaaatatatgccttagaaaactatactcttgggtggggtggcgactcgtttacagtggcgactcgtttaccgattatgttaatgtattttaccaccgagccgccaccaccaccgagccgccacctcaccctaatatattgaattgaaatgtatatatctctaccaaaacaccattaaattgaatcaactaacaactggtctatctggatatgtttctcttctatgccctggcaatctgtatattccacacccccgggggggccgtgtatgtggctgaatagttgattctctaggtatgctggggccggggggaggtactttaattacttcttgttgctgtataattaatgcagaggcttcttgaactgaaaggccttcttcggtgggtatttgcctctgggatctagtatgcttttgcttctgcttctcgttggcggtgtgtaattccttgttttctttggcgagtaggatagtaccttgtattataagacggaagccttttataagctggtttaatgtacgatctgacgggctaggtaggcttcgagatcttatataaagtagagctttaattaataaagcctgccgatatagatctttctctgtaactagtgtttttggtataaaatttcgacttgattcgctttcccggctaggggggggggttagggttcgaagctgaatattaagctttgaaatcactctttctaggttaaaagggactaaaccagctattctaaagctattcttaattgtctccgatttaaaagctttaattcgtataagagggtatactttaaggaagtcaagtttattaatataattaaacccgttctgtatcttgattttaactatccgaccgtaggtatattttaataccgcaaaataactaatatctagaggttataaaagataagataaatgcgctggtatatagattagtatcaccttattttacttataaatttcgttaaatttaggtattaaataacttctgtggctattaagaattaaaagccggtataccccctttatacgcgaagtactaggaataaagagcttcttaagctaacgaagtctaatcttatcagaggtctagctattaggactaactttaaagcgctaatcctctaggaggctgttaaactaagatttaataaagactttgcctttaaaaatcatatatagaggaagtgcctacctagaagtattcgtacattcaattgtagttacctactcgcgatttctaggttataaaagtgatctctaaccgtagtatttacttctagttataacctttactgttatagtcaatcctatagtaaaacctatcttattaaagttataaatgttatctagatcaattctatactaaagaatagttttttgaactagattaaactactccccaatgattttagggtcttcgcatttcgtatacttgtaattatactgtttcgagaattaggaggagaggagaggatatcgttttacaaatttcgtaacccaattttagctaactgaaagaactggggtagttccacacttttgaagaagaaggtccgccatttcttatactatagagggcctaggggctgctctacgtagatctatagagagaatccattttttaagagattcttccttagtctctgttaatttatatgaatttgcgcgtgtaatgcttcgttcggtatggccgtcaagacgattgtatagggtagaacggggtatattgaaagtacaggcagtggcagtaatagtacgaatttcttgcttcttaatagcctaaatagctaataaaagcctaccctcttgctctattgaatttttagagctttaggagcgaattggtggcatagtgggtggttgaagaagaagggattaaattaattgacgcgttttgggtgaggtggcggctcggtggtggtggcggctcggtggtgaaatacgttaacgtaattcacatacgagccgccactacatacgacccgccatccnnnnnnnnnnnnnnnnnnnnnnnnnnnnnnnnnnnnnnnnnnnnnnnnnnnnnnnnnnnnnnnnnnnnnnnnnnnnnnnnnnnnnnnnnnnnnnnnnnnnnnnnnnnnnnnnnnnnnnnnnnnnnnnnnnnnnnnnnnnnnnnnnnnnnnnnnnnnnnnnnnnnnnnnnnnnnnnnnnnnnnnnnnnnnnnnnnnnnnnnnnnnnnnnnnnnnnnnnnnnnnnnnnnnnnnnnnnnnnnnnnnnnnnnnnnnnnnnnnnnnnnnnnnnnnnnnnnnnnnnnnnnnnnnnnnnnnnnnnnnnnnnnnnnnnnnnnnnnnnnnnnnnnnnnnnnnnnnnnnnnnnnnnnnnnnnnnnnnnnnnnnnnnnnnnnnnnnnnnnnnnnnnnnnnnnnnnnnnnnnnnnnnnnnnnnnnnnnnnnnnnnnnnnnnnnnnnnnnnnnnnnnnnnnnnnnnnnnnnnnnnnnnnnnnnnnnnnnnnnnnnnnnnnnnnnnnnnnnnnnnnnnnnnnnnnnnnnnnnnnnnnnnnnnnnnnnnnnnnnnnnnnnnnnnnnnnnnnnnnnnnnnnnnnnnnnnnnnnnnnnnnnnnnnnnnnnnnnnnnnnnnnnnnnnnnnnnnnnnnnnnnnnnnnnnnnnnnnnnnnnnnnnnnnnnnnnnnnnnnnnnnnnnnnnnnnnnnnnnnnnnnnnnnnnnnnnnnnnnnnnnnnnnnnnnnnnnnnnnnnnnnnnnnnnnnnnnnnnnnnnnnnnnnnnnnnnnnnnnnnnnnnnnnnnnnnnnnnnnnnnnnnnnnnnnnnnnnnnnnnnnnnnnnnnnnnnnnnnnnnnnnnnnnnnnnnnnnnnnnnnnnnnnnnnnnnnnnnnnnnnnnnnnnnnnnnnnnnnnnnnnnnnnnnnnnnnnnnnnnnnnnnnnnnnnnnnnnnnnnnnnnnnnnnnnnnnnnnnnnnnnnnnnnnnnnnnnnnnnnnnnnnnnnnnnnnnnnnnnnnnnnnnnnnnnnnnnnnnnnnnnnnnnnnnnnnnnnnnnnnnnnnnnnnnnnnnnnnnnnnnnnnnnnnnnnnnnnnnnnnnnnnnnnnnnnnnnnnnnnnnnnnnnnnnnnnnnnnnnnnnnnnnnnnnnnnnnnnnnnnnnnnnnnnnnnnnnnnnnnnnnnnnnnnnnnnnnnnnnnnnnnnnnnnnnnnnnnnnnnnnnnnnnnnnnnnnnnnnnnnnnnnnnnnnnnnnnnnnnnnnnnnnnnnnnnnnnnnnnnnnnnnnnnnnnnnnnnnnnnnnnnnnnnnnnnnnnnnnnnnnnnnnnnnnnnnnnnnnnnnnnnnnnnnnnnnnnnnnnnnnnnnnnnnnnnnnnnnnnnnnnnnnnnnnnnnnnnnnnnnnnnnnnnnnnnnnnnnnnnnnnnnnnnnnnnnnnnnnnnnnnnnnnnnnnnnnnnnnnnnnnnnnnnnnnnnnnnnnnnnnnnnnnnnnnnnnnnnnnnnnnnnnnnnnnnnnnnnnnnnnnnnnnnnnnnnnnnnnnnnnnnnnnnnnnnnnnnnnnnnnnnnnnnnnnnnnnnnnnnnnnnnnnnnnnnnnnnnnnnnnnnnnnnnnnnnnnnnnnnnnnnnnnnnnnnnnnnnnnnnnnnnnnnnnnnnnnnnnnnnnnnnnnnnnnnnnnnnnnnnnnnnnnnnnnnnnnnnnnnnnnnnnnnnnnnnnnnnnnnnnnnnnnnnnnnnnnnnnnnnnnnnnnnnnnnnnnnnnnnnnnnnnnnnnnnnnnnnnnnnnnnnnnnnnnnnnnnnnnnnnnnnnnnnnnnnnnnnnnnnnnnnnnnnnnnnnnnnnnnnnnnnnnnnnnnnnnnnnnnnnnnnnnnnnnnnnnnnnnnnnnnnnnnnnnnnnnnnnnnnnnnnnnnnnnnnnnnnnnnnnnnnnnnnnnnnnnnnnnnnnnnnnnnnnnnnnnnnnnnnnnnnnnnnnnnnnnnnnnnnnnnnnnnnnnnnnnnnnnnnnnnnnnnnnnnnnnnnnnnnnnnnnnnnnnnnnnnnnnnnnnnnnnnnnnnnnnnnnnnnnnnnnnnnnnnnnnnnnnnnnnnnnnnnnnnnnnnnnnnnnnnnnnnnnnnnnnnnnnnnnnnnnnnnnnnnnnnnnnnnnnnnnnnnnnnnnnnnnnnnnnnnnnnnnnnnnnnnnnnnnnnnnnnnnnnnnnnnnnnnnnnnnnnnnnnnnnnnnnnnnnnnnnnnnnnnnnnnnnnnnnnnnnnnnnnnnnnnnnnnnnnnnnnnnnnnnnnnnnnnnnnnnnnnnnnnnnnnnnnnnnnnnnnnnnnnnnnnnnnnnnnnnnnnnnnnnnnnnnnnnnnnnnnnnnnnnnnnnnnnnnnnnnnnnnnnnnnnnnnnnnnnnnnnnnnnnnnnnnnnnnnnnnnnnnnnnnnnnnnnnnnnnnnnnnnnnnnnnnnnnnnnnnnnnnnnnnnnnnnnnnnnnnnnnnnnnnnnnnnnnnnnnnnnnnnnnnnnnnnnnnnnnnnnnnnnnnnnnnnnnnnnnnnnnnnnnnnnnnnnnnnnnnnnnnnnnnnnnnnnnnnnnnnnnnnnnnnnnnnnnnnnnnnnnnnnnnnnnnnnnnnnnnnnnnnnnnnnnnnnnnnnnnnnnnnnnnnnnnnnnnnnnnnnnnnnnnnnnnnnnnnnnnnnnnnnnnnnnnnnnnnnnnnnnnnnnnnnnnnnnnnnnnnnnnnnnnnnnnnnnnnnnnnnnnnnnnnnnnnnnnnnnnnnnnnnnnnnnnnnnnnnnnnnnnnnnnnnnnnnnnnnnnnnnnnnnnnnnnnnnnnnnnnnnnnnnnnnnnnnnnnnnnnnnnnnnnnnnnnnnnnnnnnnnnnnnnnnnnnnnnnnnnnnnnnnnnnnnnnnnnnnnnnnnnnnnnnnnnnnnnnnnnnnnnnnnnnnnnnnnnnnnnnnnnnnnnnnnnnnnnnnnnnnnnnnnnnnnnnnnnnnnnnnnnnnnnnnnnnnnnnnnnnnnnnnnnnnnnnnnnnnnnnnnnnnnnnnnnnnnnnnnnnnnnnnnnnnnnnnnnnnnnnnnnnnnnnnnnnnnnnnnnnnnnnnnnnnnnnnnnnnnnnnnnnnnnnnnnnnnnnnnnnnnnnnnnnnnnnnnnnnnnnnnnnnnnnnnnnnnnnnnnnnnnnnnnnnnnnnnnnnnnnnnnnnnnnnnnnnnnnnnnnnnnnnnnnnnnnnnnnnnnnnnnnnnnnnnnnnnnnnnnnnnnnnnnnnnnnnnnnnnnnnnnnnnnnnnnnnnnnnnnnnnnnnnnnnnnnnnnnnnnnnnnnnnnnnnnnnnnnnnnnnnnnnnnnnnnnnnnnnnnnnnnnnnnnnnnnnnnnnnnnnnnnnnnnnnnnnnnnnnnnnnnnnnnnnnnnnnnnnnnnnnnnnnnnnnnnnnnnnnnnnnnnnnnnnnnnnnnnnnnnnnnnnnnnnnnnnnnnnnnnnnnnnnnnnnnnnnnnnnnnnnnnnnnnnnnnnnnnnnnnnnnnnnnnnnnnnnnnnnnnnnnnnnnnnnnnnnnnnnnnnnnnnnnnnnnnnnnnnnnnnnnnnnnnnnnnnnnnnnnnnnnnnnnnnnnnnnnnnnnnnnnnnnnnnnnnnnnnnnnnnnnnnnnnnnnnnnnnnnnnnnnnnnnnnnnnnnnnnnnnnnnnnnnnnnnnnnnnnnnnnnnnnnnnnnnnnnnnnnnnnnnnnnnnnnnnnnnnnnnnnnnnnnnnnnnnnnnnnnnnnnnnnnnnnnnnnnnnnnnnnnnnnnnnnnnnnnnnnnnnnnnnnnnnnnnnnnnnnnnnnnnnnnnnnnnnnnnnnnnnnnnnnnnnnnnnnnnnnnnnnnnnnnnnnnnnnnnnnnnnnnnnnnnnnnnnnnnnnnnnnnnnnnnnnnnnnnnnnnnnnnnnnnnnnnnnnnnnnnnnnnnnnnnnnnnnnnnnnnnnnnnnnnnnnnnnnnnnnnnnnnnnnnnnnnnnnnnnnnnnnnnnnnnnnnnnnnnnnnnnnnnnnnnnnnnnnnnnnnnnnnnnnnnnnnnnnnnnnnnnnnnnnnnnnnnnnnnnnnnnnnnnnnnnnnnnnnnnnnnnnnnnnnnnnnnnnnnnnnnnnnnnnnnnnnnnnnnnnnnnnnnnnnnnnnnnnnnnnnnnnnnnnnnnnnnnnnnnnnnnnnnnnnnnnnnnnnnnnnnnnnnnnnnnnnnnnnnnnnnnnnnnnnnnnnnnnnnnnnnnnnnnnnnnnnnnnnnnnnnnnnnnnnnnnnnnnnnnnnnnnnnnnnnnnnnnnnnnnnnnnnnnnnnnnnnnnnnnnnnnnnnnnnnnnnnnnnnnnnnnnnnnnnnnnnnnnnnnnnnnnnnnnnnnnnnnnnnnnnnnnnnnnnnnnnnnnnnnnnnnnnnnnnnnnnnnnnnnnnnnnnnnnnnnnnnnnnnnnnnnnnnnnnnnnnnnnnnnnnnnnnnnnnnnnnnnnnnnnnnnnnnnnnnnnnnnnnnnnnnnnnnnnnnnnnnnnnnnnnnnnnnnnnnnnnnnnnnnnnnnnnnnnnnnnnnnnnnnnnnnnnnnnnnnnnnnnnnnnnnnnnnnnnnnnnnnnnnnnnnnnnnnnnnnnnnnnnnnnnnnnnnnnnnnnnnnnnnnnnnnnnnnnnnnnnnnnnnnnnnnnnnnnnnnnnnnnnnnnnnnnnnnnnnnnnnnnnnnnnnnnnnnnnnnnnnnnnnnnnnnnnnnnnnnnnnnnnnnnnnnnnnnnnnnnnnnnnnnnnnnnnnnnnnnnnnnnnnnnnnnnnnnnnnnnnnnnnnnnnnnnnnnnnnnnnnnnnnnnnnnnnnnnnnnnnnnnnnnnnnnnnnnnnnnnnnnnnnnnnnnnnnnnnnnnnnnnnnnnnnnnnnnnnnnnnnnnnnnnnnnnnnnnnnnnnnnnnnnnnnnnnnnnnnnnnnnnnnnnnnnnnnnnnnnnnnnnnnnnnnnnnnnnnnnnnnnnnnnnnnnnnnnnnnnnnnnnnnnnnnnnnnnnnnnnnnnnnnnnnnnnnnnnnnnnnnnnnnnnnnnnnnnnnnnnnnnnnnnnnnnnnnnnnnnnnnnnnnnnnnnnnnnnnnnnnnnnnnnnnnnnnnnnnnnnnnnnnnnnnnnnnnnnnnnnnnnnnnnnnnnnnnnnnnnnnnnnnnnnnnnnnnnnnnnnnnnnnnnnnnnnnnnnnnnnnnnnnnnnnnnnnnnnnnnnnnnnnnnnnnnnnnnnnnnnnnnnnnnnnnnnnnnnnnnnnnnnnnnnnnnnnnnnnnnnnnnnnnnnnnnnnnnnnnnnnnnnnnnnnnnnnnnnnnnnnnnnnnnnnnnnnnnnnnnnnnnnnnnnnnnnnnnnnnnnnnnnnnnnnnnnnnnnnnnnnnnnnnnnnnnnnnnnnnnnnnnnnnnnnnnnnnnnnnnnnnnnnnnnnnnnnnnnnnnnnnnnnnnnnnnnnnnnnnnnnnnnnnnnnnnnnnnnnnnnnnnnnnnnnnnnnnnnnnnnnnnnnnnnnnnnnnnnnnnnnnnnnnnnnnnnnnnnnnnnnnnnnnnnnnnnnnnnnnnnnnnnnnnnnnnnnnnnnnnnnnnnnnnnnnnnnnnnnnnnnnnnnnnnnnnnnnnnnnnnnnnnnnnnnnnnnnnnnnnnnnnnnnnnnnnnnnnnnnnnnnnnnnnnnnnnnnnnnnnnnnnnnnnnnnnnnnnnnnnnnnnnnnnnnnnnnnnnnnnnnnnnnnnnnnnnnnnnnnnnnnnnnnnnnnnnnnnnnnnnnnnnnnnnnnnnnnnnnnnnnnnnnnnnnnnnnnnnnnnnnnnnnnnnnnnnnnnnnnnnnnnnnnnnnnnnnnnnnnnnnnnnnnnnnnnnnnnnnnnnnnnnnnnnnnnnnnnnnnnnnnnnnnnnnnnnnnnnnnnnnnnnnnnnnnnnnnnnnnnnnnnnnnnnnnnnnnnnnnnnnnnnnnnnnnnnnnnnnnnnnnnnnnnnnnnnnnnnnnnnnnnnnnnnnnnnnnnnnnnnnnnnnnnnnnnnnnnnnnnnnnnnnnnnnnnnnnnnnnnnnnnnnnnnnnnnnnnnnnnnnnnnnnnnnnnnnnnnnnnnnnnnnnnnnnnnnnnnnnnnnnnnnnnnnnnnnnnnnnnnnnnnnnnnnnnnnnnnnnnnnnnnnnnnnnnnnnnnnnnnnnnnnnnnnnnnnnnnnnnnnnnnnnnnnnnnnnnnnnnnnnnnnnnnnnnnnnnnnnnnnnnnnnnnnnnnnnnnnnnnnnnnnnnnnnnnnnnnnnnnnnnnnnnnnnnnnnnnnnnnnnnnnnnnnnnnnnnnnnnnnnnnnnnnnnnnnnnnnnnnnnnnnnnnnnnnnnnnnnnnnnnnnnnnnnnnnnnnnnnnnnnnnnnnnnnnnnnnnnnnnnnnnnnnnnnnnnnnnnnnnnnnnaataaagaatagggacttcttagttatatcctaagggagtattaatactataaaatctactatcggtaggtattctaactaattatcctagttctattctatatagggttataatcgctacgctatatactagttagcaatttcactttatctatctgtctaagggtaatatatggttaataactttctttttatacctaggatttaatagaacttagtctagaattctaagataaactaacctccttaatcagagataattatatctaggattcctgtgatctaaataatataatctacaaataagtatactatagcttttatatctatttccttctaataaggaattaatattagtcgcttacttaaacggtctactactataaatatagtattatatctgtagtaatcttttaggaaagatctaaaatctattataatatattactatagttattccggtactagtagggaatatagtagtcctaaagtataatctctctatacctttattcttttataaattaagtagttattaacgtaatacttaatatctgttatctatcctagctaataatattattctaataccaatttctttagcttcttaattcctaggtatataattaacagttattaatatatctcattaagaagccttatataaagatctcctttattaggaacctcgagttagttcttaaaaagtaatagtctattataaagtatctactttagattacttccttcaatagctatctatcggaatagtttaagtttagtattttattagttagcttattttatatagtttataatcttaggatcttctagtttaattagtaagagctctataagatatacacctttcttaaagtatttgacggaaaaacggtggtaaggcgagtgtattttgtggcagaaaaatcttaataaattctctaactctctaaaactgacaatagtcctaaaacatgacaatctgatggacaacttagtaatcaaaacaaacaaaacaannnnnnnnnnnnnnnnnnnnnnnnnnnnnnnnnnnnnnnnnnnnnnnnnnnnnnnnnnnnnnnnnnnnnnnnnnnnnnnnnnnnnnnnnnnnnnnnnnnnnnnnnnnnnnnnnnnnnnnnnnnnnnnnnnnnnnnnnnnnnnnnnnnnnnnnnnnnnnnnnnnnnnnnnnnnnnnnnnnnnnnnnnnnnnnnnnnnnnnnnnnnnnnnnnnnnnnnnnnnnnnnnnnnnnnnnnnnnnnnnnnnnnnnnnnnnnnnnnnnnnnnnnnnnnnnnnnnnnnnnnnnnnnnnnnnnnnnnnnnnnnnnnnnnnnnnnnnnnnnnnnnnnnnnnnnnnnnnnnnnnnnnnnnnnnnnnnnnnnnnnnnnnnnnnnnnnnnnnnnnnnnnnnnnnnnnnnnnnnnnnnnnnnnnnnnnnnnnnnnnnnnnnnnnnnnnnnnnnnnnnnnnnnnnnnnnnnnnnnnnnnnnnnnnnnnnnnnnnnnnnnnnnnnnnnnnnnnnnnnnnnnnnnnnnnnnnnnnnnnnnnnnnnnnnnnnnnnnnnnnnnnnnnnnnnnnnnnnnnnnnnnnnnnnnnnnnnnnnnnnnnnnnnnnnnnnnnnnnnnnnnnnnnnnnnnnnnnnnnnnnnnnnnnnnnnnnnnnnnnnnnnnnnnnnnnnnnnnnnnnnnnnnnnnnnnnnnnnnnnnnnnnnnnnnnnnnnnnnnnnnnnnnnnnnnnnnnnnnnnnnnnnnnnnnnnnnnnnnnnnnnnnnnnnnnnnnnnnnnnnnnnnnnnnnnnnnnnnnnnnnnnnnnnnnnnnnnnnnnnnnnnnnnnnnnnnnnnnnnnnnnnnnnnnnnnnnnnnnnnnnnnnnnnnnnnnnnnnnnnnnnnnnnnnnnnnnnnnnnnnnnnnnnnnnnnnnnnnnnnnnnnnnnnnnnnnnnnnnnnnnnnnnnnnnnnnnnnnnnnnnnnnnnnnnnnnnnnnnnnnnnnnnnnnnnnnnnnnnnnnnnnnnnnnnnnnnnnnnnnnnnnnnnnnnnnnnnnnnnnnnnnnnnnnnnnnnnnnnnnnnnnnnnnnnnnnnnnnnnnnnnnnnnnnnnnnnnnnnnnnnnnnnnnnnnnnnnnnnnnnnnnnnnnnnnnnnnnnnnnnnnnnnnnnnnnnnnnnnnnnnnnnnnnnnnnnnnnnnnnnnnnnnnnnnnnnnnnnnnnnnnnnnnnnnnnnnnnnnnnnnnnnnnnnnnnnnnnnnnnnnnnnnnnnnnnnnnnnnnnnnnnnnnnnnnnnnnnnnnnnnnnnnnnnnnnnnnnnnnnnnnnnnnnnnnnnnnnnnnnnnnnnnnnnnnnnnnnnnnnnnnnnnnnnnnnnnnnnnnnnnnnnnnnnnnnnnnnnnnnnnnnnnnnnnnnnnnnnnnnnnnnnnnnnnnnnnnnnnnnnnnnnnnnnnnnnnnnnnnnnnnnnnnnnnnnnnnnnnnnnnnnnnnnnnnnnnnnnnnnnnnnnnnnnnnnnnnnnnnnnnnnnnnnnnnnnnnnnnnnnnnnnnnnnnnnnnnnnnnnnnnnnnnnnnnnnnnnnnnnnnnnnnnnnnnnnnnnnnnnnnnnnnnnnnnnnnnnnnnnnnnnnnnnnnnnnnnnnnnnnnnnnnnnnnnnnnnnnnnnnnnnnnnnnnnnnnnnnnnnnnnnnnnnnnnnnnnnnnnnnnnnnnnnnnnnnnnnnnnnnnnnnnnnnnnnnnnnnnnnnnnnnnnnnnnnnnnnnnnnnnnnnnnnnnnnnnnnnnnnnnnnnnnnnnnnnnnnnnnnnnnnnnnnnnnnnnnnnnnnnnnnnnnnnnnnnnnnnnnnnnnnnnnnnnnnnnnnnnnnnnnnnnnnnnnnnnnnnnnnnnnnnnnnnnnnnnnnnnnnnnnnnnnnnnnnnnnnnnnnnnnnnnnnnnnnnnnnnnnnnnnnnnnnnnnnnnnnnnnnnnnnnnnnnnnnnnnnnnnnnnnnnnnnnnnnnnnnnnnnnnnnnnnnnnnnnnnnnnnnnnnnnnnnnnnnnnnnnnnnnnnnnnnnnnnnnnnnnnnnnnnnnnnnnnnnnnnnnnnnnnnnnnnnnnnnnnnnnnnnnnnnnnnnnnnnnnnnnnnnnnnnnnnnnnnnnnnnnnnnnnnnnnnnnnnnnnnnnnnnnnnnnnnnnnnnnnnnnnnnnnnnnnnnnnnnnnnnnnnnnnnnnnnnnnnnnnnnnnnnnnnnnnnnnnnnnnnnnnnnnnnnnnnnnnnnnnnnnnnnnnnnnnnnnnnnnnnnnnnnnnnnnnnnnnnnnnnnnnnnnnnnnnnnnnnnnnnnnnnnnnnnnnnnnnnnnnnnnnnnnnnnnnnnnnnnnnnnnnnnnnnnnnnnnnnnnnnnnnnnnnnnnnnnnnnnnnnnnnnnnnnnnnnnnnnnnnnnnnnnnnnnnnnnnnnnnnnnnnnnnnnnnnnnnnnnnnnnnnnnnnnnnnnnnnnnnnnnnnnnnnnnnnnnnnnnnnnnnnnnnnnnnnnnnnnnnnnnnnnnnnnnnnnnnnnnnnnnnnnnnnnnnnnnnnnnnnnnnnnnnnnnnnnnnnnnnnnnnnnnnnnnnnnnnnnnnnnnnnnnnnnnnnnnnnnnnnnnnnnnnnnnnnnnnnnnnnnnnnnnnnnnnnnnnnnnnnnnnnnnnnnnnnnnnnnnnnnnnnnnnnnnnnnnnnnnnnnnnnnnnnnnnnnnnnnnnnnnnnnnnnnnnnnnnnnnnnnnnnnnnnnnnnnnnnnnnnnnnnnnnnnnnnnnnnnnnnnnnnnnnnnnnnnnnnnnnnnnnnnnnnnnnnnnnnnnnnnnnnnnnnnnnnnnnnnnnnnnnnnnnnnnnnnnnnnnnnnnnnnnnnnnnnnnnnnnnnnnnnnnnnnnnnnnnnnnnnnnnnnnnnnnnnnnnnnnnnnnnnnnnnnnnnnnnnnnnnnnnnnnnnnnnnnnnnnnnnnnnnnnnnnnnnnnnnnnnnnnnnnnnnnnnnnnnnnnnnnnnnnnnnnnnnnnnnnnnnnnnnnnnnnnnnnnnnnnnnnnnnnnnnnnnnnnnnnnnnnnnnnnnnnnnnnnnnnnnnnnnnnnnnnnnnnnnnnnnnnnnnnnnnnnnnnnnnnnnnnnnnnnnnnnnnnnnnnnnnnnnnnnnnnnnnnnnnnnnnnnnnnnnnnnnnnnnnnnnnnnnnnnnnnnnnnnnnnnnnnnnnnnnnnnnnnnnnnnnnnnnnnnnnnnnnnnnnnnnnnnnnnnnnnnnnnnnnnnnnnnnnnnnnnnnnnnnnnnnnnnnnnnnnnnnnnnnnnnnnnnnnnnnnnnnnnnnnnnnnnnnnnnnnnnnnnnnnnnnnnnnnnnnnnnnnnnnnnnnnnnnnnnnnnnnnnnnnnnnnnnnnnnnnnnnnnnnnnnnnnnnnnnnnnnnnnnnnnnnnnnnnnnnnnnnnnnnnnnnnnnnnnnnnnnnnnnnnnnnnnnnnnnnnnnnnnnnnnnnnnnnnnnnnnnnnnnnnnnnnnnnnnnnnnnnnnnnnnnnnnnnnnnnnnnnnnnnnnnnnnnnnnnnnnnnnnnnnnnnnnnnnnnnnnnnnnnnnnnnnnnnnnnnnnnnnnnnnnnnnnnnnnnnnnnnnnnnnnnnnnnnnnnnnnnnnnnnnnnnnnnnnnnnnnnnnnnnnnnnnnnnnnnnnnnnnnnnnnnnnnnnnnnnnnnnnnnnnnnnnnnnnnnnnnnnnnnnnnnnnnnnnnnnnnnnnnnnnnnnnnnnnnnnnnnnnnnnnnnnnnnnnnnnnnnnnnnnnnnnnnnnnnnnnnnnnnnnnnnnnnnnnnnnnnnnnnnnnnnnnnnnnnnnnnnnnnnnnnnnnnnnnnnnnnnnnnnnnnnnnnnnnnnnnnnnnnnnnnnnnnnnnnnnnnnnnnnnnnnnnnnnnnnnnnnnnnnnnnnnnnnnnnnnnnnnnnnnnnnnnnnnnnnnnnnnnnnnnnnnnnnnnnnnnnnnnnnnnnnnnnnnnnnnnnnnnnnnnnnnnnnnnnnnnnnnnnnnnnnnnnnnnnnnnnnnnnnnnnnnnnnnnnnnnnnnnnnnnnnnnnnnnnnnnnnnnnnnnnnnnnnnnnnnnnnnnnnnnnnnnnnnnnnnnnnnnnnnnnnnnnnnnnnnnnnnnnnnnnnnnnnnnnnnnnnnnnnnnnnnnnnnnnnnnnnnnnnnnnnnnnnnnnnnnnnnnnnnnnnnnnnnnnnnnnnnnnnnnnnnnnnnnnnnnnnnnnnnnnnnnnnnnnnnnnnnnnnnnnnnnnnnnnnnnnnnnnnnnnnnnnnnnnnnnnnnnnnnnnnnnnnnnnnnnnnnnnnnnnnnnnnnnnnnnnnnnnnnnnnnnnnnnnnnnnnnnnnnnnnnnnnnnnnnnnnnnnnnnnnnnnnnnnnnnnnnnnnnnnnnnnnnnnnnnnnnnnnnnnnnnnnnnnnnnnnnnnnnnnnnnnnnnnnnnnnnnnnnnnnnnnnnnnnnnnnnnnnnnnnnnnnnnnnnnnnnnnnnnnnnnnnnnnnnnnnnnnnnnnnnnnnnnnnnnnnnnnnnnnnnnnnnnnnnnnnnnnnnnnnnnnnnnnnnnnnnnnnnnnnnnnnnnnnnnnnnnnnnnnnnnnnnnnnnnnnnnnnnnnnnnnnnnnnnnnnnnnnnnnnnnnnnnnnnnnnnnnnnnnnnnnnnnnnnnnnnnnnnnnnnnnnnnnnnnnnnnnnnnnnnnnnnnnnnnnnnnnnnnnnnnnnnnnnnnnnnnnnnnnnnnnnnnnnnnnnnnnnnnnnnnnnnnnnnnnnnnnnnnnnnnnnnnnnnnnnnnnnnnnnnnnnnnnnnnnnnnnnnnnnnnnnnnnnnnnnnnnnnnnnnnnnnnnnnnnnnnnnnnnnnnnnnnnnnnnnnnnnnnnnnnnnnnnnnnnnnnnnnnnnnnnnnnnnnnnnnnnnnnnnnnnnnnnnnnnnnnnnnnnnnnnnnnnnnnnnnnnnnnnnnnnnnnnnnnnnnnnnnnnnnnnnnnnnnnnnnnnnnnnnnnnnnnnnnnnnnnnnnnnnnnnnnnnnnnnnnnnnnnnnnnnnnnnnnnnnnnnnnnnnnnnnnnnnnnnnnnnnnnnnnnnnnnnnnnnnnnnnnnnnnnnnnnnnnnnnnnnnnnnnnnnnnnnnnnnnnnnnnnnnnnnnnnnnnnnnnnnnnnnnnnnnnnnnnnnnnnnnnnnnnnnnnnnnnnnnnnnnnnnnnnnnnnnnnnnnnnnnnnnnnnnnnnnnnnnnnnnnnnnnnnnnnnnnnnnnnnnnnnnnnnnnnnnnnnnnnnnnnnnnnnnnnnnnnnnnnnnnnnnnnnnnnnnnnnnnnnnnnnnnnnnnnnnnnnnnnnnnnnnnnnnnnnnnnnnnnnnnnnnnnnnnnnnnnnnnnnnnnnnnnnnnnnnnnnnnnnnnnnnnnnnnnnnnnnnnnnnnnnnnnnnnnnnnnnnnnnnnnnnnnnnnnnnnnnnnnnnnnnnnnnnnnnnnnnnnnnnnnnnnnnnnnnnnnnnnnnnnnnnnnnnnnnnnnnnnnnnnnnnnnnnnnnnnnnnnnnnnnnnnnnnnnnnnnnnnnnnnnnnnnnnnnnnnnnnnnnnnnnnnnnnnnnnnnnnnnnnnnnnnnnnnnnnnnnnnnnnnnnnnnnnnnnnnnnnnnnnnnnnnnnnnnnnnnnnnnnnnnnnnnnnnnnnnnnnnnnnnnnnnnnnnnnnnnnnnnnnnnnnnnnnnnnnnnnnnnnnnnnnnnnnnnnnnnnnnnnnnnnnnnnnnnnnnnnnnnnnnnnnnnnnnnnnnnnnnnnnnnnnnnnnnnnnnnnnnnnnnnnnnnnnnnnnnnnnnnnnnnnnnnnnnnnnnnnnnnnnnnnnnnnnnnnnnnnnnnnnnnnnnnnnnnnnnnnnnnnnnnnnnnnnnnnnnnnnnnnnnnnnnnnnnnnnnnnnnnnnnnnnnnnnnnnnnnnnnnnnnnnnnnnnnnnnnnnnnnnnnnnnnnnnnnnnnnnnnnnnnnnnnnnnnnnnnnnnnnnnnnnnnnnnnnnnnnnnnnnnnnnnnnnnnnnnnnnnnnnnnnnnnnnnnnnnnnnnnnnnnnnnnnnnnnnnnnnnnnnnnnnnnnnnnnnnnnnnnnnnnnnnnnnnnnnnnnnnnnnnnnnnnnnnnnnnnnnnnnnnnnnnnnnnnnnnnnnnnnnnnnnnnnnnnnnnnnnnnnnnnnnnnnnnnnnnnnnnnnnnnnnnnnnnnnnnnnnnnnnnnnnnnnnnnnnnnnnnnnnnnnnnnaactaaatcaaaccactctccaataatccttgggtcttcacatttcgcgcgctcgtaattataacgtcttgagaatcgggatgcaagggtagggtgccgtttaacaaaatgtgtaacccaattttggccaactgaaataaccggggtggttccgcgttgtttaagaagaagatccgccatttctcgtaccatagagggccggggggccgatccacgagaatccatagagattatccattttcgaagagattcctcttcaattgcggtcaatttagtcaagttggcgcgagaagtcgcgcggtgttgtataccactgaggcggtcccgaagggttgaacgcggtacgttaaaagtgcgggcggtagtagaaatattggaaaattcttgattcttaaaagcctggatagctaataagatcctaccctctttctctattgaatctttagaggattgagagcgttttggtggcatggtgggtggttgaattaactaggtgctaattcatggacgcgtttttggatggggtggcgggtcgtatgtggtggcggctcgtatgtgaattacgttatgttgtagttagttagttagttagaaaatggtgctaattaaggcattcaggcatcactaagcccccaaagcgggttttgaacgctggcccttcgtaggctgtcggtaaatgcatctttgatgaaagtcagcctcgctataaataaagtaggagattataggttgtaccggtaggggctgtgggcttggcgtgaggctgagcggagattgctgcctgcagggctgatagatttcagcttcctataaatatttatcaactgcaagatatcctcaaagtcctcacaacccaagtcttcacaaaccatcatggctcccctaaaaatactggtcacgggcaaatcatccgtcacccatgccccagaacttggcaccctcagattctcagtaaagggaaatggctccgagcaagacaaagtcgccaaggaagtgtcaagtctatcgaccaacctacaaacctggatcaaatcagcctttccctctgccgacaatgagcccgatgcccctatgacaaaattctcatccacgagcatcagaacctggacaaagtcaacaggtagacacgaccagcccttgccaaacccataccatgccagtatatcattcaaagccgtcttccgggacttcgcagagttgaaccacgcgatcgaagaattgctggtttatcccaaggtggaaatcgacagcctggattggggtctcaccgacgaaaccggcagacgactggcttcagatgcgcgcaaattggcactgcgcgatgctatccatcaagctgctgattactcggaagtgctcggatgctctgtttccgtggtggaaatttccgaccaacaagcgagtccctacaggactagacaccttatgggtgcttgcaatagtactactccctttggggatgactctccggcactggacctcacgcctcaggatattgatgtcgaaagcgagatcagtgtcacttttgaagctgcgtgagatgtttggcgttgttctttcttcggcccaaccagtggactgtggatattggttgcactagactacatgtttgatttatcaagatcttgaatatgtgatatattcgtattatatgttccaatcctttttgagcctcggttagcattaaagaaagccccgctgaagtccataaagccccgggaatggaatcatgcaaccaacttatagaatcaatgtacgtgtcgtaatcatccacaaagaagttcagcggcagtgtttcaactctagaaccagcacgaagtgtagaaggcagctctagcctctgtgttcttcctatgctggaagtcgattaattcttgccttgcctgagggggctcctaagcttcgaatcgtttttgaacagtcgccctaaaggagaggcaattcttagagtttgaatacgatgtagatatggagaaacagcgtgtcagattcttcagggtcagagtggacggaggggagaaggaggagaggagaggaagagagctactaagtagacaatgtgttccccgcttggtgccttagtcaacagacacccgacagctgactaattagttataatgggggaaagaaaacctgttgcattcactagctaagagagggagagaaaggaagtccaggtggggaagcaagatactatctatatgaggcaaacaacggtctcaacaagttaactttgtgatgaaaccgtatagagatatgctcaagaaacatgtataaggctaggtatgcagctaaattaggaaagagatgtcagcacgttgatgtgcgcttaaatgacggatttcaatagtacttactcgttcggctatacacttgggttgcccccagttgtccaaacgcacttcgccgcctcggtgttgactttcaacgacagtaggtctgggcgggaatagtggccaaccgtatcaatcattgccttggcgtagtcaatatctccgaggttgatatcagcttgcaggatgcattcctccccagcggggggtgcctccacgagagaggctccgtccggtccgaatatcatagagaaccctccactaggctgctcacagaaatcagtaactatcaccacggatggaaagaaaagaagaaaaaaacaaaaataacacagatgagaaaaatgagaattaccgtttggataatccctccttcaaccaggttctgcttttggagactctctctcttgactacctgcgtacaaaccagcacaaaggcctggccctcaatggcgaagaattgactggcattgcgactcgccacgtccgtttcatggaaaggccatttcaaccccttgggctccgggaactccgccggccagctagcgacgtgaatctgcaccccctgcgagtactcgtagaaccgtaggagcggctggaggtgttcccagcagttcaggcctccaatgcgaccaaagggggaatcgaccaccgtttggagagactccgcctggccctcgccccagatagaccgctccacatgggtgggcttgatcttacgccgatggtgcacaatctggccgccggggttgatgaacgactgcgccatgtataagctccccccgtcgcgttcgctgtagccgagcacgatgaatatacccgcttccttgacggcctgacgaatagtatccatttcgggggaatcacggtttagtgaattggccatgtactggtgcataagctccatgttgtccacaacgctgcccgtccacattgtcctatcgagcatggggcgactaggtcagttaatgacctctagtgtgcgcttgcggtggcatcattcccttaccacagatagcccggaatccacacctcggggaaacccaggacattgatgcccttcgcaccagcttcctggattaatgcaacgctctttgcgataccggcggccaggtccagccaggcgggctcggcctggacagcccccacacggactcgagtcatcttgtatgtgttaggtttctaatttggtaagtttactaggatccgacgtggtgaaaaaaaaaacaaaaaaaagagtaatatggtggtatcgatcaggtcgaaccacaagtgcactcgttctatttattatatgagacacatgctttggttatctcctcgatcaatgtctcgcataggcatgcctgtttgagaaagccactccttttttcctttgtatgtaccctgccatgccagctcgggcgaggattcacgctaatgcacatgcacctcctagcctatttggaggtgctgataataccaataccacataatgtacaaatatttactgagtactccgtacagatatattatctttggcgtatgtgcattagcgttctttttcggccggcctggcatggcagggtagcagatttcctcccccacttgttggctttccctgtctatcggcttaccagcgtatgttgtaggtatgagaggccgcggcctccgagctataatccgtccttttgtgggccccagcaccacgagacccatgctagacgaatatagtgcgttacggcaccgtactttcgagattctcctggcgagacgctgagtgagagtagtaatttactaagtccttaactcgacagtaaatctgattccgaatgttaccgtactacatacatatgtatctaactctcctcttcactgatcttgatcgagtattcgttctgtccattttttctatacaccattccttctaaatttcccccgaaagaaccgcaatgacaaccatccaccaggtccccaatgaagctggtgcaaacctcaacatggcgcacttggtgacagtcgacttagcacgcattgtgaccggtgactctcaggagaggcagaaactctacgatgctgctacacgtcctggagcgttttttttggacttcaagcagagcagtgaagctatactcgacgcctcgcagcagttgtatgcgctatcggaccgttattttcaacgtcccctcacagaaaaattgaaggatttccgtgaggatcaacctgcttccagcgaccgtgggtaagaaacactcttctaactcgttgttggcatcagctgaaccgactctatcaaagttacaagagcagtgattgtgatgagacattcgaggtacttatcagccctatccgttgcgggtggcagagactctgctaactatcttcacaagtttgccgatgacgagctcttccgtggtgacctaagactcccgtctattctgcaggatgaaagcgatcgagtccggcaattcaacaagctctgccatgccgccgccatgagtatactttcatcactctctgattccttgggtctggagggcgacggacggtttgaagcgtaccatcagactacagacagcagcgataccggcctcaagctcatatacgagccctcaattgacaaggccactgacgtggtcgagaataagcacaccgatagcgggagcttgaccctcctgttctacgagcagctgggattgcatgtctaccttcccgagcaggaccgatgggactttgcagcggtccctaagcccgggtgcgccctcgtcaccgtggccgactccctgcgacgcttatcagacttgaaattccactcgccgctgcatcgtgtcacgcagcccagggacggggctgtgaagcggtattttctatcatactttcttcgcccttcccacaccgccaaggccgcatagggccaagggccaccgagttgttaaccgatttggcccagcagctcggcaccaggttgaacagatagttttgtaggacttagcaacaattatcgttacttttgccaacctatgacctatgggttacatccctgtagatacatatatgctctacgtactccgtagtatttatagtctgtcatgtgaatttattataaacacactggtgcttctccatgctaataagctgaccggagttacaggggctgacagagcccgcccgcttggctgcgatccgaacacccgcacggtgcgaatacgcgactggtgcctttattaatcccgtcagacagtgggcatatctcgtcactgaggggagctgtccttagctgaccgtcctggatggttggtgttgttgtgtcgttctcgtcttgcctgcatggccaggctgcccatcgtgccnnnnnnnnnnnnnnnnnnnnnnnnnnnnnnnnnnnnnnnnnnnnnnnnnnnnnnnnnnnnnnnnnnnnnnnnnnnnnnnnnnnnnnnnnnnnnnnnnnnnnnnnnnnnnnnnnnnnnnnnnnnnnnnnnnnnnnnnnnnnnnnnnnnnnnnnnnnnnnnnnnnnnnnnnnnnnnnnnnnnnnnnnnnnnnnnnnnnnnnnnnnnnnnnnnnnnnnnnnnnnnnnnnnnnnnnnnnnnnnnnnnnnnnnnnnnnnnnnnnnnnnntccccatacttgctagctgacccctccctggatggttggtgttgttgtgtcgttctcgtcttgcctgcatggccaggctgcccatcgtgcatttccctcttcagtatcaatataggctgtggaattttatttaattattatataattagtaggtggagagatcaaagttcaaacaatgtgctacttatgagaatttcaagtgcttgtttgaggcctggctgaagctctactctcaacaatcaccggacgcttggttatagatgctcaagactcctaccgtcaaatcgcgcctaccttttccttgcccctgaagaacagcagagctacagtgcatgcggcaacggcaagcgagaaattgaaccattggctggcgtgaagtccctggagtaaggcagataaatcaccctcaactcccctgtggcttatggccctcctttctaccgatatttgcaccacggttgcaatcgtgattccaacggccctgcccacctgcaacacagcagtaatcagcgccgcgccgagggcctgatcttctagaggtaagcactgcaatgtgaaaagattgagtgtcggatggacaatgtcggctcctaatgtagacaacaacatggctgggaagctgtaagcccagtaggtagtcgacggtggtatgggaacggccataaggaggcatgaaatgcccacgcagctgcagctgaaaactaggaggtagtaacccgggacacgggagaggagtttggcggcaatgatattccccacaaatcccatgattcctgtcggtatgaaccgaatagctgtgtctagtggtccgagtcccatatagtcttggtagctaggtaagacatagctgtcagctcttatccatctccagtccctcgaggaagccatgatagggaggtatgacacttacaagtacgtcgcgtagacgaggtagttattgaaagccgcaaacagtgtggccatgatgacctgtgcggcattgaaacggctgttgcggaagatagaaatcctcaagagaggcggcctctccgttttcctgtcaaggtaccatatccacaaggcgaacaagagtaacaaaacgaaggaaagcaggagcgataacagaacccaggacttcgtccatccgacaacgttgccttctgttagagcaaggttaaggagtattatggctccagtcaccaatgtgccgcctacccaatcaacattgaccagaaggtcggagaaagaggaagcctcaacctttgagtgtgggatcaatatttgaccggccacagtgacaattccacagaggatggcggatacccagaatatccatttccagctgacgtactgcgcgatcacaccactaaatatattgcctagcaccgatccgcaggaagacccggccgagtagatagcaaatgcgtagttcttatacttaccgggctggaaagtagcaccgaggatcccgatcgcagtcggaacgttggcagctgcacccagaccttgcaggcctcggaataggtccatgacaatttcgttcggtgcgaacggaaccaggatggtaacgatggtgagccaagcggacccgatgaggaagacggagcgacgtccaaagatgtctgcaaatctaccaaaaaggagcagaaagcagccaaaggaaaggtaataggccgagataatccactgttggcgctcagcaggtatacctaggtctcggccgatactgggaaggatgataactgttgactggacggcgagtgtctgctatatcgtcagcaaaaatgcatgtgatttcggacctagcacctgacttgcattgagaaaggctgctccagccaaggtaagaataagcgggagatgaagcttctgccctgcttccagctcttggaacgattcgatctctggctcgggcttctcgttggaagtattgaaagtaccggcgctaatggcaagcggtttgttgtcggccgacgactccatgatgaaggtggcaccgtgcatgttatcaatactggcaggctgaggctgcgcgccagcgttcccagtggtcttcttcatcgtggcagggaaccccaatagccgtgcgaaagttgaattgccaaggtttgagggcaaaaatgggatacagggtttccctgtataggggaactaaacaagtgaggagattgtaacagagtagactcgggaggcgcaggttcattaggcagtgtgcaggatctatgtgattttcttcttcttctccctgtattttatttcatgctagattggagcataggcacattcaaaatatactatttagtagctaaagatggtaatatgatactagctgcattagcggattttattactgtaggaacaatacccatcttacagggaacttggccgagcaatatggacatgtcacatgcctaatcaggaaccctcggggagatgactgagcagagaccgaataagcgcggcctccggccccgctctgccaatcgttattctatgtattgatatccgagcaccattacgtaggtaccttgcaaacctacactaatcagtcaaaccccatttaaatcatataattgtctgagagaaaacggggttccaaagtggtgagggccttggcattttgggctgtgtaacgtgccatttttgcactatatggttattttattttagggaccagcataatcccgaaaataaagcgaaccaatagacttatattagtcacgtggacggtaggccctaaagcccacttttgaaagggaagtttgtggacccgggggcactatacctaattaggcagccttggcactctttatcgaaaagaaatatggggagccctttttcgaaagtgatcggggtttacggggtttgactgtacaaaatactatagaggatctgcggtgccccgatggactcttaattgcgccgcaaagcccggaaatacagagccattacaatactgttttttttttctctccagtccaatcggtaatttgactaatattgtcttgcgcgagacacccatactagtatgtatgttgtataggtcccgactcaatggtttctcggcatttgtatgggctggcaccaaataaaaccagaaatgctagtaacttatcgaggatcgaccggccactcttcctctgttccgtttacttcatgctcccccttggtatttgctcttttctcactcgaagctattccaccatcttccccagcgttcaaaatccctcgcaccatgggatctgtcgatatccaggagggtgtccaggaatctccccccaaaacgcctctgatcgaggatgccccagacggagggctcacggcatggttgcaagtcctgtgtggccatctgattgtcttcaatgtctggggttacatcacttcctatggcatcttccagtcctactataccacggctctaaatcgcaatgccgcggatatctcctgggtcggttccctacagatcttcttcgtctacttcctaggaacattctccggccgagccatggacgcgggctatctccgcgtcactttggtcacgggcctgttcctacagttgctgggcgtctttatgacctcgctggcgactagctattggcagctactgctctctcaaggtatctgtcagggcatcggggatgggctgctattctgtcctatcgtcgctttgatgtccacctatttcacgcggaagcgcacaatagccatctctatctccgcgtgtggtggagccaccggcggcctggtctttcccgccatcgcgcagaccctcctacaccgcatcggctttccctggactatccgtgtcatgggcttcgtgctcctgttcaatgcagtggttatcatggcctgtgtgcggcagcggctgcctccgcgcaaattaggcccattgatcgagttcaaagcgttcaccaatctttcctacactttcttcgcgttagggacgtttttctgcttctgggccgtctactatgcctattattatgttagttcacccccatctagtgtttccttcctgtcacttttgtggttcatcgtaactgaccaatatgtccaggtccgctcgtttagtcgagatatcataggtgtttctgattacacctccttctccatgttgatgatcatgaacggactaggcttgcctggccgtctaatcccagcgtacctttcggaccggtactgtggtcccgtcaacgcatttattccagtcagcgccatagcggccatcctactatactgctgggctgccattgactcttacgggggtctcacggcctttgctgtggtctacggcttcttcggcggcggtgtgcagagtctctttccatcggcggtagcgagcttgacggatgaaccgagcaaggccggtgtccgtatcgggatgatcttttctattgttagtatcgcctctttgacagggcctccgatcgcaggagccctcatcgatctcgacgggggtcagtatctatatgcgcagctcttcggtgggacatccatgatgataggttgtctcctgcttattatggcgcgatactttaagtgtggcatgaatttgtatcagcggatgtagcgagatgaaaaagagcaaagaaagctcaattgaggggattccgacaggcagcaggggaacagccacgacattatcacggagttcaatgtgggcctaactccaattttgtaatatgatagaagagacaggtactattgatttatggcgattttggttaaaaatgtcacaatctgcgttgtcgtatgtctgcatacgccataggccatattatacacctctagttctcgcccaacatagtcgcacatactccttacgatgttttccggcgctttcaaggcacattccactgaggcgatccgcaggttcctcttgcagagtgcaagaggcacaatttcatcggatttcagaagttgaataggaaaaggctgccaccgagccccgagcatcgtcaggcctcccttgcgcatgaggctccggcattcaataccactcacatgtcttttgaggatggcttgtctctaacgcggtagactagtaatggtggtgcatatcttggaaaaaaaaatatagaatagcgaagaactccttgcgagaaagttatattatgtgaggcgaagcttttccactgcatacagacatgcttcttagactttctatccgaggttctttcacattttgcgataagtattttggaaacctaaagtctcattcgtctatcctcatctcctatcatctattatcacttgtatctcccagattaatctcaacctcctttaatacattgttgttcatcgccctacgaattttgtaacctgcttcaactccaagtggtcatctccatttttagtctctcactcacgcaataaataaccgggcccttgtcgtccttctaccaagtttatcacttaatcaatttgatagctcgacacaatcccgccacggcctttgtgcccaactcttggccccgttgatattcatcatatctttgctctgtaagcttctcgtcctctgcgcaaagcttgaaagccagtcgctcagtccagatgatgcttctcaagtactcctgatccatcagcggcaggagcttagaccttaggacggctccatgcagcgctgaaaatgccgaagcgagtcctaacagcaaagatctattcttgatcggccgcatggagaggtgtaacaaggccacagagaactcacaaggccacaagtcgagcacctgctgaagcgatattggctgtggcagtccggcgtgtttcaccatgtgtagacctatctcgataaggcccacctttgctatccttctggcctcgtccatgccggccacgccagcgtcaacggaagtaaagccgttgtatgctttgaggacacggatgacggccgatatcgtctggttcgctgttcttgaaggcactgtcaccaatccttccaggacacactggtgtgtgaaccaaaacggaagaagtttgggaaggatagtcctggcgtcaggatttgatatcttcaagtcgtagtcagccgcatggatgaagtcgagaccttctaagcttcccgggacaaacagggggtagtgtatgcgaatatcccccctagtaggaggcggaagcgggggaaggtcgtcgaagagcctgaggtaagcctgtgggctcgggttgcacaggttgtcaatccacctcctgacaagatcgacttcggcagaggtgaaggacccaaacatcttgccgccccaagacagctctcgtatcaaacggctattggcactatcgcccggacgtacccatggttttgtcctagctagagccgcgacgaacctctcttggctctgaatcgaagagaaattctcggggatcagccactggccgagtgtctggccatcaagcttgataaggctgggacagtgaatattcccggccgcctgtgccttggctttaaacacttcagcgagcccattgttccactcgttgctagaggttgttggagagacaaattcagggcaagaaagcgcgcttgaaaggcaatagccggcttggactctcctccaggccctttctgccaccccggctccctctgttagttcgacgtgtgcgaggaatttcgcgacgctgttcatcgccatggcagtgtgtcctgaatgggagttatcgatgctgatgtgaaggaaaaagtaatatccactaatacccagctcctcaagctctttggccgccatcatggtctctagcgtaaggagctcgaagtgcatattatatccgagaatctcaggaagaaaatcgtgagggaagagggagatgagaagttgtgaaacggcggctttccatgctaggttattgaccatgccatgccgagggtggatgaaatcggccgagtctggttggggaagggaaattccagcctcccgaaggagctgactgtacaggtggacatggtgcatttccaggttcccatccccgtactcctctgacaagacctgccaagcgtctctagtcacatgtcgtttcccatacggcgtgctgacgcggtggatatgaccaacccaagctccatcgacgagcttaagtggtgccctctgctttatccagtcatgagattcatctcgggtctggaatagctcccgcattcctcccaacttccttctggaaatgtattgctcccattgtacagcgacttgctcatcctgcttcttaataaaggcttgtatggaggctgggctacagcttttcagggacatgattgaatcagctctttttcgctcccaggataccccctcggccaacaaagaaagcaacgtgtcccttgccagtgggaggaattccggataatcctccagattatgaagcttgaagtacattctcatatacagcagtcgcctgtattctgaagaattaaccgaagcggctgatgctaacaatttccttaacaattattcacatccatatgcagtataggggtgtgtggcaagtaacataccaggcaacttcaaatctttagctgaccccaccgacttagcaggttgtcgccgtgctgaaaaacctagaatccagaaagtggcaccacagaggcccaaggcgacaaagataaggtacggaaacatctccgtagaccgagtaaccttgagaggagcaatttcaagttcaaatttccaaacgtgaatgtccgtatttgggtctgtgattctaagaatacacgaatttcgaaattgataggctggtgatataggaaggagaggtccttaatattgtgagctgaaaggacgtggagggcaaagacgggatatcctatacagggaagaactaaaagagtagagcttggaggcgtaggcttatataggatccatttagtcttcttctttccgccgtctttctttcccactagattacagcatagcatcagtaagcacacttaaaatacccatggtgtaggtgtcctgaagtcgcctgcttgctctcctgggattaaaagaaatgactaaaagatagagaaatccaaccatgtctttttaccatatgtaaccaatgaatgtagtccaaggttacctaataatacgtaccgatgtttttttttttgtattatgttgtaaagcctcttacagggaataaaacaaatgattgatgtaacgtatcttgtactgtggtcgagtgaggttaaaaacgaagtctaggcctcgatatgccttttacatattgttgccatatactaccaagggtactttatttagagatttcccttttgggagggaacttttggaggcagagtgtagagtacgccgcaggtgggggcgattgcggcgacggcgctaatacagttcctccgcaaagtttccgtacgaatatatatctccgtacggagacttttgcggaggaactgtagatccctgtggaggttggtgaatctaaagttggaaggagtagttacagggcacgtgcgagggcacggatatcataagtccaccgggcctccgccggcggctcggcccagccccgctcggtcccactcgccctcgcccagcacctcatagtaccatttcacgaaagcagggtgatttcggccgaaatgccgtgactcattctcgacagcatcgccatgtcaactgcttcttacctatatataaaaatttcacccctctcgttgtggcgtacctccgtgcgacctactcgaaagcagtctgaacagtgggtttgctgttttctttcacccatctacaacaacgccctgattacagacctccaaggttgttcaccccagtatggaaggatcctaccccctgcaggcacgcaacacggtacgccgccaccgcgaacgagccaagtacgacttcgagacggttcattccattgtgaacgcgtcacccatcctccacgtgtcctttctgcctacggacccgagtgatgacccctttccaaccatccttcccatgattgggtatatgggctcatttgatggcccatcgactggggctctcgatgtatatcttcatggccatagtgcctcacgtgtcatgcgcttagccggcaaccacggaccggagggaatcccagtctgcatcgcaacaaccctgctcgatggtatcaagctctcgttgacgccctttaacaacagctgtaactaccgcagtgttgtgctgcacggctatgcctcggttgttacggctgaagcagagaaagaatgggctcttcacctcatcacggacggcctggtgccggggtgttgggacaattcccgcgtgcctcctacgcgtgccgagaacctgagtacatctgttctcagagttcacatcgccagcgctagcgccaaaatcaaccagggtgggccttctgatgacaggaaagaccttcaaaacgacgaggttactggtagagtgtggacggggacacttccactctgggagtctgttgggacacccattccaagcattacaaacaaagtgaccgaggttccggggtacgtggttcaatggcgacagaatcaaaatgcgcagaacgagtcatacgctcgggaagccattgagaagggtaaatagtgataaagctagtacagagtcttctctaaacattacaatgtgatcagttcccatcaggataggccaatttatccaactcctgccattcttcgctctctgcatacgtggctcggataggagccagcagaacgttgaacgcatccgccacggccctcttcaaagattctggttgcagctggcctgctacgaatgctgcttcaatggcctcatacgaggtgaaatcctgcccctctccatgctcagcgtaggtggtaaaaacagtgtcaatcggcgaccctagtctgcagaaagggcgctggtccagctcggaaccggtgctctcgtgtaagttcaggcctgtcttccctagtaatctttccatgcgctgctcactgatgggaattagaatatctcgaagcagccctaggactccatttcccgtgacttgtcgttcggggcacgctgcgccgaatatcttgccacggactgtttcggggtcgtccagaaactcaatcttcgtctccgccgacttggaagaggacatcttcaaaccatcaagccctgctaccatggcattcatcagatgctcccggcggcggtacccgagcatagggatgaacttcttggcgtgctcaaagaggcccgtctgatccccagaaccgttagcaggaatttaagtgagtagttttcatcctacgaacctgatcctcgccgccatactgtatgtccagatccaggtacggctctgagagtgactggtagatggagcagagcaggggacttatttgttctgtctctgccacttcagctgaggtgtcccgcgcatctttttgcgtcatgatggcgcagagcttctggacatcaatcacaaagtccttttcataggcaaggctggactcggccacgaagttcacttgagacggtgatacgccaagtgccttcaggatagcggtgaccaggaagtggtaatactgttgtcgatatgccacagtctccatggaatggatgtagttaacaagaaacccgtagacgtcaagatagtacacagtcacctaagcatgcgtcagtacgcaggtcggcttgggctatagatgggttatacggacatcaaggccagccctgaggaagtcaagcagcttcgcaattggcacgaagtatccaacatgagctatacgacaaaggttagtgccagcatcattctcctgtcagccaaaaggacacatacgcttgcctgtaggtgtggtttcccaggccaacttgagcttaggcttttcttccaggagcccttgcagagattctgcgtccgcaggttcgaggaaggattgcctcctagtaatgaggttcagcttctcctctgtagagagcatcttttgagacattgaaaaggtttggattttaaattctagtcctggaatggtaggaaatctgcttccttaaatactaatcgtcatttggggatgacatgaacggcactattcgagtcccttgcgaaactctgtggggacctttcgtatactatctatgatgggtgaatttttgctgtgggccagacactacgctatagcattggctgaatttcagtacctaacagggctttcggtacctgaccttttgctcgtagccgcagtagtgcccatcgctcctattttcggaagaagccatcgactcgccatgatagtaagcgggagccccataatgaccgtaggctacatcaactaatgccatactgtagtattaaccaagaacataagccacataataatgctgatttgcaaatactaccctggcaacacgggcaagcaacggacggacccgccaaatactgtagttctcccccgaggcgtgatcacatgccacctcagcttgcagatgccggtcttcttcgggatggtaggcggagaatccgactcgaagaggctcgggctagtagcttagcagatgcggaccaccttggcagattcagcctctcgtaagatatttaaggatgtgagattaattccgccggcctccgattttattccggagcactgtcccctacgtgaggtggggctcgtttactccgaaagatgcaggtataaactcatcgcaaggatggaggaagagcaagtacggttacatcgcgcatatccagggatatttccaatcgggtcttctcgagcatgtatgtagtccgtatttttgggttcaaacaatcgtcttgaagtggtatgtctaatttccacaaatattcactctcgtattctagttcaccggccagtatcaaggccaaatatttcctcaagtatatttttcctttgtctgggtgctagcgtatctatagatgtatcaatgttatttgaagggtaacttacctatgtaaataagcttgacgttttgcgttgtatcgatgtttctttgctaagtcgagctagacttttcaagagagtagtcacttacttattcgcatgatttctccatctttcttaagactctctgtccctcatcactacatcagtccctaaggctagacttagaaaagaacggtagcataccatggctcaatccctcccgcatctgcctaagggcatcccatcccctctggttatgtggaaagacatgactccctatcacgcacgactacaggcagcaagcctctcgtctcctcgggtcctcgtgattggaggaggtgtgacgggcttgataacttcatgggcgctgcttgacaaggggtaccatgtgacgatcctctctaaggagtgggcatcgtacggccacgagcaacggctgacctcgcagatcgccggcgcgctgtgggaatttcctccggccgtgtgtgggcagcacaccgacgccatctcgctggccaactctaagcgctggtgtatggtcgcctaccataactgggaccagatggccgccatccccgctatcgccgctgtttcgggtgtgtccatgaagccagccgactttttcttccccaatcctattgaggaggacccggcgcagttggccaagatggaggagatcatggctagcggcgttcgggggttcctccgctctatccgcctaatagagaagcgccacatcgatccgcaatacggcgccgtcgatggttatgagcacttggcaccgattatcgacaccgaccaatgcatggcttggctcatggatctggtccaggccaaaggtgccacgctcgtaacggagacactgcagggggacatcctcgaccatgaggaacggcttcgtcgacgctttcaagcagacgtgattttgaacgctacggggctagctggtgccgagctcgccggcgatacctcctgctatcctatccgcggcggactaattcgagtcatcaacgatggctcggacttccccaaggcggaggccgccctcaccatctccgctgatgccgcccactctgagcatgagatcgtcttcctggtgcctcgcaacgacaacatcctattgatcggcggcattgccgagtcccacgaatgggatctggatctgacactggactcgcccatcattaagcgcatgcgagcgcgctgcgagtccttcctccccggtctcaaggatgctcgcttggaccctgactacccattggcccagggactgcgacccttccgggcaaagaatgtgcgtgtggagcgtgaactgcgcaaactgggccgcaagcctagccgcattgtgcactcatatggccaaggcggtgcgggatggagtctctccttcggctgtgcatcggatgccctggcgttgattgaagaagccctgctggatctggaaccggttcctatggccattcttgatcagaaagattattcttgccccatggtatctcagaccattcaggccaacttatagtggatatctgcctctagattttagtcggcgcacgcgtatgagttgatagtagacatcattgccagggttcagggtccggatcctcgcccctcatagaccctcatttcatacaatttctacgctttacataaatcggttgaataaatacgccgattcatccaataagatactgttgtttacacctgttctagtactttggataatctatgttgttcatcttgaatatatctttctgtcctaagtaaatttgcgaaattgcgcgataaccaagggccttacgactccataaactcgatcacgttatttatcacctccagcacttttgtctgatactcacgtgaggctgccttgcccgctgaaatgatggcttgtgctgttgaaatagcacctgttctaactcagaggaagattaataattgggtcaggaattatttcagacgctgcggctttgttcctgatctgcaacagcctcatatcatctcgtattgacgcactaggcattccttcctcacctattcacatcatgaagtggtgcttgacatcaatatacttggacttccgttggaattatgagtttctggtaagcttcaaggcagaactgtcaacgtagagaggaactgcattgatatgaatcccggggatgcagaggtcattgataaagtttcgaatcaatacagcttccttcgcagcctccacacatgcaatatgtctccgcatctatggaaacgactgattctaacttctaatgctacgtaaagtgtgactgtagaagctctggggaagataatgatggttcattctctagtctattttttctgctggttgggtttttctgccaaagttagccgttgacttttcaccgcattctttctcatgattttggagcccgtaggataaaaccccctggtcacgtgacatacacacacacgaggttatgatgtaattgcttcgctttgctccgcaattaatgaagcgagacgaagaatacagaaatgtacttagacggcgtcatggtaatatcataaatcatttaatggctattcaaattactatagggataccatagtaaatgatacaagctgatcaaaaactgcggccagcgggagacatacccgaagtagtttagcgcggagtgtgtcgcaagtaaaatgaatgtgtccatagacgttctctacccaaaaggggtcgaattagcgattatggggggtccctgtaacaatccccttctttattttattcccttgctcaagtcattcaatactgatgtaggcgcatacaagagagaagtgatcaaccagaaagcgatgatatgaagatggatggaagatggtgatctagctactgccatgaatctctctatatagctccatgctacaaagccaccagatcccatcctccagaaatcagaagaagcatctctgcaggtatacaaagagaattccaacacggaaagctgaacagcaagtcatgtcatctgcgagtgaagtgaaagaaagggaaaggctttatcgaggtcaccagttaccaagcattcagtaacttcagctatcagagctaaccatgcagtcgtcgatgtcaggccaagcgccaagtcaggctttccagtcgaacaagcggcgaagactcgtccctacgattgatcctgatatgatcgagccacttaaccgcttttcggatatgctcgctgatatgaacagcgatgatcctgtcattcgatcccgtgcggctgcgcagcttacagtattatctcctttaatgcaacaactcgcctttgcaaagaacgccgccggcgtccattatgctgcaagggatttcaaaacccttggagtggcctgtatattctggagatcacacaaggaatgcgtcaaatacagtgtgcatcacacacgcataatggaacgaagtatcccggtaccttcaaaatgcaatcaattatatttttactcaaacagaagagcaaattaagtccgatctaaagtgtgtcgatgagatccgcaaatcattggccacaactgccagcaatctctctactttgtccactcgcaaacgccgccgtgaggaacccgaataatgatattcgcaagacaaagtcgttgccctctgagaagcttcacctggggtttctctagctcttctgcttattctccttcttccatctcttatttcaaagcttcgtttatttagtattctcctgagactcaaactgtcatttttagtctacgcagtaccctagggtcgagatctatatcgcttaaagagagaccatatgtcttttatgtcagtgtgaccaagtggataggagtgaggatttatgtcataagacacagcagtgacaccatcctgattttcgctagctcgtgtcgtgcttcgtgaacatgggtttcatatatccacggttcagtcattacaatctgtggcatttgatgtctagctattgaagaggggtccctgtaacggggacaggggcaccgatagccctgcttgcaaaacaggtgtgagagcagagttgttactgagagggtgctagagaggagaatatgttgggtgaccggaaggcggtcacccatgtgggtccagatcactagatagttccgctccctcttcctctctctctctccctcttgtccatcagatcttagccgaatctacactagttgttttccccttttcaggtacaacgtagttagatcgccattacaatctcaggtatctttaatctgtttgatcactacattctcacttcaagatcattgatctctaaaaaataagaaagaaaattgctgaatctgatgcttaattaaggatatcccacccctccgatacctcactacactttcagcctggtactgactttgttgggctctgggtatgattcagatccagccagatcaaaccatgagaccagaaattagtcttcacggaagaggaagctgcagagggagatagagactaagctatgctcgtggaatgggaaactacaaattcggcaggcacgaacctattaagtcgagagtacatcgtgtttcccccgagcactcgatgtttttcctctcattaacattcttgttatagagtacattactgccacgatcacgatcaccactactttcttgcatatcgcctctgtggctccctcgcccacccctccctccgctatcgataacctagtgaggatcctaaatagaagctctcgattctcgaaacacgactgggggcttttcgtgcattagctgacatctcgcggcatagcatctaaaacctaaatccggcccccgcggccgaggatactactgctaagactgtggcccatgccggcgggacagccaggtaagttgtgattcatatgccccatcattgcccctattcactggtagtaaacgctaattttggaacatgttgaagccaataccaaccccgctggccccggcctaggcgggccctcgagcccctcgcttgtcggccggctcttcgacaaggggaaagaccgcttcgccagcaaatccagtggccagcgttgcccgcaccgctgcccatggtttgaaggaaggcggcaagcccctcccctaggcggcgtgaggggttgtggtgtcgacagcgttcctctgttgttttgtccgatttcttctctccgagaacctgagctaggtgagatgaatgaaaacggatgtaccatatatgtaaggcggggatggcattcctctggggccttttgaccgtttttgcttctgtactggcctcggtattccatgtccttattattttcacacccgcaatcccaaatattgatctagtggaagtctgacaaaccaggtatcaaggtagatacttgtctcaacactatatatcttcctgtttgcgagttgtccaccgtaatactagctctttcaatgtcatattttgatccttgacacgcccctaatagtgttcttcgccaacctcgaatgcggaatcgccattgtatgctccagggctgacaggttagattacaaagcacatctagttaactaacgactacccaccattagggttccttgctcttttatgtactttactttcttgacaagtagcaaacacgctacatgtggtgcccttgatggaaatggatcttgacagaagacgaactgaaatcctccgttcctacaacacaatggctaggtgatttccggattgggaaatatatccctttatcctcctcatccaatgattccacgcccttattcaagctccaagcaggagtcggctccttctcggatcggccgccaatgtttcgggccgatcttgagctctttcccgctgtcggcatctgtgccgagcaggcgccttctactccgatcgctttgactagtacgctttgagccgcaccccactgggatatgctgatcggggcgaatcggagcccctccatcattgaacagctcatgagcaaaccagctttgcctgacgattccaaagtccaatccgaggcgctaggtaccaataggcgaactaatcatgttacagttctgctacaagaggtcagtggattttgctgcttctgtcctaaaatcaaggtccaagagtgagagccacagagatccaggttgctccactgataagcccgaacctgatccgcccgaatatgatctgcgtcaagctccttgaattgcagttgacctgttgatagcagctgatgctacttttgtacttcgattttgtattgtagataatctaatgtaatattcgggacattgagattgacaatgacatatagaataaagattaacgcaagtacaagtgtcatattgccctaaatggccgtactgttcccgtcgttccggtcaacctaggtaaaaaagcccagcggtaaaaccagccccacatccccgcggagccccaacgccgccgataaccgacctcggctcaaagcgaccccgtgatttacatatgacctttatcttcctcccgaggttactctttttcccttccttttcttcctcatagcaccttgagcttattctacacttatatcacaatggcttctattattcgttctttgcgacctttgtcgcgtgcccctacagtccgcctagcgggcaagcgcctcgctgctggccggcccgtgcagaggtaccgttttgcccatgagcacaccaatgctattaaaaacaaattcgctaaccagtttacccccattatagcgcgtatgcattttccaccacaccccgccggcgggaggtcgacatctccgagctgaccccgacacccatcacccatttgtctgagacggagtctctgatggccgactcggtatcgaagttcgccgcggagcaaattggccccaaggtacgggatatggacgaagccgagcacatggatcccaaggtcgtcgagcagctcttcgagcagggcctgatgggcattgaggtgcccgaggagttcggtggcgctggcatgaacttcaccgctgccatcgtcgcgatcgaggagttggcacgcgtcgaccccagtgtcagtgtgctggtcgatgtccacaacacactcgtcaacaccgccatcttgacgcacggagatgcccagtctcaccgtacctggttgcccaagctgacttccggcactgttggttcgttctgtctttccgagcccgcgtctggttccgacgccttcgcgctccagaccaaggccgagaagaccgccgatggttataagatcaacggctctaagatgtggatcaccaactctatggaggctggtatcttcatcgtctttgccaacattgaccccagcaagggctaccgcggtatcactgctttcattgtcgagaaggatacccccggtttctccatcgccaagaaggagaagaagctcggaatccgcgctagcagcacctgtgtgctcaacttcgacgactgtgtcatccccaagagcaacctgctcggcacggaaggacagggatacaagtacgccatcagcaccttgaacgagggccgtattggtatcgcagctcagatgaccggtctggccctcggtgcatgggagaacgccgtacggtaagctttcttgttcaatccacacccgcatatgaatccgataagctgaccaaaccaaagatacgtctggaacgaccgtcgccaattcggcgacctcatcggaaacttccagggtatgcagcaccagattgcgcaggcctacactgagattgccgctgcccgcgctctcgtctacaacgccgcccgcaagaaggaggccggccaggacttcgtccaggacgccgctatggctaagctcttcgcttcccaggttgccggccgcgtgtccagctctgctgttgagtggatgggtggtatgggcttcgtccgtgagggcattgctgagaagatgtaccgtgacagcaagatcggcgctatctacgagggtaccagcaacatccagctccagaccattgccaagattctgcagaagaagtacaccaactagacgtgtgatgggggtgattacctacgccaaatggctttgtttgtatatagtttgattccatgcaggatgtggcgtattgattgtttttgggtatgtattcattgttccctttggggtatacacaaaacatgaagagccatcatgggtcatccctgtgaccatttcaaattcactccgagatatgaatgtcaaactgtgtacaagagtaaagagcagactgaggccatgcgaatgtgcccagccttgtttgtatatccaatcctagcaatcatcttctggcgtctgctgaccaccgctcatcgagtcgcatattgtagatggaccgtgctcgggcagcttacttcattcgacagggcgattatttctgttatcatttttgtcgttattatttatgcatgaaagacaattccaatcgcaatttccgcaacgactatgaagtattgctttgagatctatagcaatgatcagtatgcatcttcgtatcgaggttcttgaacgaaactcacatgacaggagaccagatcgcctgaactcgcaaggcattatgtttccaccgaatcaatgtccttgaacagccccggttgctggcacatgcgttattccacatgtgctattcacgatggaggcacccatggaaactcatatgtcggatccgtctgttgcgattgaggcattggttgcgggtacgctgatgtggagggttggtaggcttgggcggaagttggctgaggaacgggactggcactcgacatggaaagtgaccgatcgctgtaagtgaattcggagaaagaggattcggattgttgctggggtgggcagatgggttgtccttggtgaattcgactatctatgggatatggctccatacgattcgggaattcgggattggaggctgcgccgagcgacggcgaccttgtgggcggatatggttgctgccagtcatgccgaggagacgctcgacgcggtactaacaggcccgatggctgggtgtgggatgttgcagtgaagtgtggcggtggcaatgcccctgctggaatacccgatattgcactattcgggggttctcccaaagaccactcacttcgaaacgaagccatcggctcgttactggaggcaaactccggtcggccagtcaaagcagcaacttgatgcttcaatcggatgacttcattctccagaaaggcattgtgttgcacgacttcatcgaaccgctcggttcggagccgcatctcctcaatttgtgactcaagatgttctatatgctccttggtgcgttggcgaatggaccgttgagcctctcgatcgttggcacgctttcgctctagttgttccgcggacaatgtcgagactttccttgaccccgatcgagattcacgtctcctcgcaggtggttcatcttgagagctcatgattattggtttcctcgcacacccgagactcgatataaagctcccctccgttgcccagaacctttcaaagagaaccccccgctggcgaccatggacccagcactgcagcctaacatgaggggaagtggtggatcactggttttgaaagatggcgtgtgggtggctcgagactatttccgagcggagcagggatcaaggcagagcgtgacagatcgtgccaattcagggctagattggtttggacgactatacggtgtggggaggaaaataaagatgatgtgcgtggtatagccatggatcctttcaggacgtgattataaccttcccagcaaccgagtggctgaataagacctgaatattgttcccctcttcaacacggcacctcattttctccagattgcttaacaagccaggcaaatctccccgatgatgcggcgaaagcgagactctaagccgacccctaagcacccaataagcgtggagagatcgaactgtgtggatagctacggagtactccgtacgggtcatgaatatagtgttttctttccagccactacggtgagccgcccccatcgcgaggtccgcttttttcgactcctgctcccacttactcaagggtcttctgttggcgccaagccgtgcgccataatgatgggcatttatggggtgctccgtactccgtaccgtgtactccttttccgttctgtgtgctggctgagcgattcaagttgagtgttgttccgtcaagccggggcgcacagaaaaagtactaaaaagacggcttgcgccataaggcatccacagaccatcggtgatgatccgcgtctttgtggagatagcgtcttgtggagatatgtacggagtaaaaggcggacgagaatcctttggcccccgatggtccccgagaatgtccaggtatccacgggctccggggaattatttgcacggtataagcagactaatatctctagaagaagggcatctgatgttgtcagactgattgtttgaaaggcatttgtccgcaatagccgcaaggttttgacactcctattatcgtggtcttatgttcaccctaagaattttaacgggggattgcaattttattattcgagcaccaccgtgtccgctctgacgggaattgagaaaccggatgacctctgcattttgatgtttgatgcgtctaaggatcttattgaccatataggggattttacctattctggagacataattagactattccggagacatagttagaatcactcccccatagatgctgcgccttgctcactcgaaatctgccagagcataactcatgcttaccgacgtttaataattgactgaaacgtatacaagcgacaccgacatgtccagcatacgttgtacatgatcgccatgatgtggaggtatgtaagtggggaattgggcacggtcatgaaaatgctacacagtagaccttacgattttaagcggcgtgtatgcggacgtttgcactggtttaagacacggtccgtgacctccggtcgatcatatggatctgatgtcggcgttattcgccgtgagccctaaccgagtagccactcttgaatttacgatattggccaaccgtcccgaatatgttctagtcggtgagaataaaaacgcgcgcaaagtatttgattggatgaggaatgattcgtgttcatgacgggtggcaaggaaggtgactgccataaagtgaggaaaatgttataatttggctgagatgtccttagcgaagctgacaaccctgttagggacatcatcggagattgcttacaacaatagaatggcccaccagaagtacctacgtaggtgctactactatgtatcggtcttcgccccatattgggtgatcgactaggactattgggcgaatcatatcaataggatatggcctcgaagcatcttgcagggattccttgaaaatctgagttctgacatgctgctttgcgtttcttccagatcattctcctctgtaaatcgctgcatgttttcaacgtaaatgatcacactaacctacgccctagaacttctagaagtttcccccgccggttcaaagcctccggaaatatggccacgagaaggaattctcagcagggataactactaaaggtatagccataacatccatctaattttggccaagtatttggacccctgatatattttcgcatgaaaaaagactctgagcaggcgaattaccatatgcggttagtctgacttcccaggaactgtcccacaattcacgtgatatcaagcgaagatagtgggtcttatatggccaatcacatgacgcataccagactttaggacaatcttaaatgcttggcaacaaatctcttctttgtcaaatgtaaacttgtaatgattcacatcatcaagcatcagtctaaacttttgctaaactagaacaaactaggaagaaagattacactcactcacaccttctctttgtcttgttttgtcaacaaacattaacattcattcactcgccacttcgagtttgaattttcatcaaagcaattaactgcagtttcttgaagaaatataagcctcgaccatcatggaaggtcttcaactcaaagatactcagctgtactcaactatggctgggaagctggatgccaggctcctcaaagcccttgaggtgatgggcttcaccaatatgacccctgtccagcagcgtgttttgaacgagctgccaagttggcgcagtgactgtcttgtccaagccaaaaccggaactggaaaaacccttgctttcttgttgcctgcattgcactgcctgcttcaaggtgataccgcgccacccaaaggcaaagtcggcatcttgatcattaccccaacccgagaacttgcccaacaaattgccaaggcgtgtgatgaactaacctcgcaacttcccactcctcttgagtgccatgttgcagtcggtggaacagcccgagcatccgctcattcgcgcttcatgaagggcgcaccttccattcttgtcgccaccccgggacgcctgtgcgactacctttctcaaactcccaccgctaagaagctgtctaacatccagacattggtcttggatgaagccgacacgatgcttgagagtggctttatcgctgatgtgaagcgcatcctccaactgatcccacaaaagagcactgggtggcaaggcatgtgcttctcagccactgtcccacccaaagtcaaggatgtggtcaatattgtgttgaagagagactacaccagcatttccaccattgataagaacgaagcaccaacccatgagagagttccccagtactacgtgctgatgccgtctgtggcagataccttcactacacttgcctccctgctcaagcatgaaatcaagactagctcaaaaatcatcgtcttcggtgtgactgcacacatggttgctctcctcgcaggagtcttctgcaagggcatggttcatttgaaggtgttcgagatccactccagactcaaccagggtgctcgcacaagaaccaccaatcagttcaaggaagccgaatccggaatccttttcgcttcagatgttattggtcgtggtatggatttccccaacgtcgacttggtcatccaggtcggtttgccatcgaacggcgagcagtacgttcaccgcgtcggtcgtaccgcccgtgctggcgctgacggtcgcgctatcattctcctcacggagggcgagtcgttcttcatcaagaacaaccgccagttgcccatcaagccccatcccgactccgaagcgatcaatgccggcgctgcttcatgctccaaggctgtcctggaggccatgtacaccatcgacgaagagtcgaagcaacgtgcttactcgtctttcattggtttcttcgctgggtccggtcttctgaggcagcttcgtctcgacaaggccggccttgttcaactcgccaacgagatggctgtcaagggcatgggatgtcccgagcctcccccaatggacagaaaggtcattggcaagatgggcttgaagggcgttccgggtttcacatatgcagaccccaatgagatgggccgaggcggatcctctagacctcgcaactcttcccgaggtggcaagagtcgcgatgcactcagccctggagctggtcaaggagaccgaggcggtgttgagaagcgcggaggagggcgcggaggccgtggcgcacgtcgtggtggtggcggcggacgtggaaagccgagatcatgatcttttttgcatattgatgtcgagcacagcgtgctaaaatgttattatccatagacactagagactaacgacctgctacacaaaattccttaatcgaacccaaaattacttgcgaacagttgtcacatcttgatgtaaagtcgtaaaggccaaactggaagctagccacggtactcaccattgctttgagtccacaagattccgacttaattgacacagtgtcattattgatcttgacagttgttcttgggaatactaaaatggtcaggtgatcacaggtaaacacacatttagagcttcaacactctaccattccaacacgtcattctttaacttggaacatttcagggcgatcagctatctatattgataactgcccaatatggatccgagctacaaagctcgcaaggaggcctttgtgtctaatcttgcgggaagcacaatcctcgagatcaatgcagtgacactcgttgcttcagtgagaaacctcaagactttatctcgcaattgatacattctgacctgtgaccactctagacctctgtcctcctttggtccgcgctccagtctcgcctatccttcttcacgccctacggtcctgcggcgctcgcgaccgacttcatcctcaatgtactagccatcttattcgcaacgactgcatactcctccgcaccgcttctcctcaacatcttcctcatctcccccgcggtcctcctattcctcacccgaaacggcctgcgaacaccccaaaaagccaaaactccccgcaaacctaaggccaaaaatgagagcccccaggaggagcagcaggctttgcccattcacccattcttgaccacgtaccgtgcggccatgatggttgttacctgcatagctattctcgcagtcgacttccgcgcgtttccacgtcgttttgccaaggtagagaactggggaacatctttgatggacttgggtgtgggctcttttgtgttctcggctggagtagtctctgcgcgcgcggttttgaagggccggaactcgaaatcaccaaaattagctttgcataagagattgattgggtcggctcggcattccattcctctacttgtgctaggcctcatccgactgtggagtgtgaaaggattggactacgcggaacatgtgacggaatatggtgtacactggaactttttcttcacgcttggctttttgcctcctttcgtggagctattcgactccttgaccacattgattccctcgtatgaggtgcttgcacttggaattgcagtactctaccaagtcgctctggagtcgactgatctcaagagttacattctcgtgtctcctcggggaccagacctactctccaagaaccgagagggagtcttttctttcatcggatattttgcaatcttcctagctggacggggtgttggagtccgcatcattcctcgtggtacctcggccacaatatcgcctcagcaggcacggagctctgttttggtgcgcttggttctgcagggaatgttctggtctaccatgttcttcttcaattccacctacgcattcggctatggtgccaacatcccagtgtcgcgccggctggctaacatgccgtatgtgctttgggtgtcagcattcaacagtgcccagcttttcctgttctgtctgacagagactgtgtttttccccgcagtccaccgagccactagcaaggaaggcgaagcagagcagacatcctttgcgaccagtcgaattttacatgccttcaaccgcggtggccttgcattgttcctggttgcgaacctgctcactggagcagtgaacctgaccattccaacattggatctcaacgcgccgcaagccatgggcattctaattgtctatgcggcggtgttaactggtgctgctttggggatggacaagtacaatattaagttgagcttgtagatatattggaatacttatagatgtagtattatctaacttaaacattgcatatagatgttcatctgcagggatataaacctctgacgtaactcgagtttagccgcggcatgtgatattggtggagcaacatatgagcccgctccgagagtcacgcaaaccattctgcaactaacactatgcctgtcaatgaacaatcttttcttaattaccctccaacacttgagggtcctaatgtgccgtacaagtatgaagaccaggtcctaccggtcttccgtggcgtgcctctagccatcggcgctacattgtaagctacaggagagctccattgagtgatcgccacatactaattcaccgctgtttcttccagaattcataacatcgggtttatccaaagccatttctggcgcaatgccggcttcggcgtcattcgtgaaatcccccacttgggccagtacgccggccgctacgatccaactgtaattccagtcgacaataccacccaggccgaggcagaagcgaaagcggcatctgcagttgtggagcgcaggaagggagatcatggatactatacttctgcagactaccgtgcgctctacttgtcgggggagctgaccccgaccgctgtcgtcgagacgctattgcctctaatccggcgtgatattcagccgtccgggaaacactcggttgctttccttgagtctcaggtcgagttgattcgtgcagcagcggaagaatctacggagcgatacaagaagggcgagtcgttgggtccactcgacggcgtgccggtcgcagtgaaggatgaggtgcacctcacggggtataagcgcacgctaggctcgaagctggatttcaagcacggtaccgatgcaacctcgtggtgtgtaaagcaatggctggacgccggagctataatcatcggaaaaacttctatgcatgagattggactgggtgagttcttattggtcatcatcgagtttcagtagctagttaactaatactctccagacacaaccaacaataacccgaactatggaacacctagaaacccccacaataaggagtactattgtggcggttcctccggtggctctggatatgctgtcgcagcgggccttatacccattgcgctgggcgcagacggcggaggctcaattcgtatcccgtcgtcattttgtggtatttggggcctgaagccttcacatggtcgtgtgtccggtgcgccatcgcaaagtctcgcgcccagtgttggcgttatcgggcctatggctgccagcatcgatgacctcgccctcgcctatcgaatcatggccactccggcaccagcttcagaggacccgatttcatcgcagttcccctatcctgttccgccggactctgatgtcaaaaggacgaagacaattggtattgtgcgcgactggatcgaccgcgccgagggccctgtgcgcgctgcacttgatcgggcgctcgactactatcgcgagcaaggctacaacattatcgatatcacaattccttaccttcccgagggtcagcgtgcccacgctcttaccatcatggcggagatcgcatctggcgttgatgcaagcaagatccggcagctcacagccccgaacaaagtgcttgtctctatgggcatgtaccaggtcaccgcacaggacttgctcgcctctcagcggctacgcaatctcctcatgacgcatctcgcgcatctcttcaagacccaccccggtctgctcattgtttcgcccacaactcctatccctggatggcatattgacggcggtgaggcggatttatctcgcggtttgtcggatgctggatcatctgtgcgcaatatggaatatgtttggctggccaactttactggttgccctgctatcagttgtcctgttgattatacccctggcggtgtgcctatcggtgtgatggctatgagcgaatggggcaccgaggaagagctgatcgcctttgctcgagatggagagcctatcttggacctgcctagtagttcttcgcccgaggaaagtgaaattgcctcggcaactaagggtctacgaactccttctgatgatctctctgtgtgggaagatattatcgcacaggccaaggagaagatatccaattaagcagagtcaattctaatcaatggtggccggttgatatttttgtcatttattatattccgatgtgttcatttacaagtcacgagacaagcctttccttagtctgaacaatatacgtctccctctgtattttccaactctctctctattcagactttcaaactcccctcattcagtccaacctttgcactattccttgctccagtgccgcatccgtacgtgcatcggcgcaccatcttttgggtgcgacgttgctttcccggtggtatacattcgctcaccctcaacagtccgccggtccactttcaagccctgcagttcccgcagctcatcccattgatcccaggccatctcaatatcaaaactacgtacagtaaagaccaacaccaatttgagcacaacgaccgccagttcctgcccgatacatttcctaggcccaagttggaacccacgccagatgtttttcgccggatgcaacctgtcgccttctagggcggaaaatcgctccggcatgaatttgagcgggtcgacaaagttcgctggatcatggtgaatggtgatagagctgtcgaaaagatcgaacccgtctgtcggccaaggctcgtcctcgccgtttattttcaggttgaatgaaggctgaccttcccgaatcgtgatcgttgctggattcatgcgcagtgtctccttgatcactcccagggtatattgtaacgagtccaggatatgaggcgcttcgcgaatcttttctgcggcaacgcttggatcggagccgagaatcgcgtcatgttcagctcgcaattttgcgacacattccgggttcaactggagttgtctgaatacacggggaattgtgatggacagcgcatcatcaccgccaaagaaaaatatcatcagctggtagaagacttgttcgatgaaggcttcatctgggggattggcggttcccttgcctccaagctcgccagtatactcttcaactgcagaccggattatggttcgtgggctattgctagcggcgtttataccgtttgtgataaacggtcggagatgtttgaagagctggtttctcttacgttgtacgatcagtttgaacaacggggtaatcctccacagaagcttgcgagggctcagagttatttccatgcggctcaattgctcgcggtaagcgatagtgaaaggggagggatataacgattgggaattaagccgggtatcgctggagttgtcagcgaaaaagtagtgaatccccatataagacgatcgataggcttgacttacagaaccaccctccccgtgacatcaaatgccaagttgctagatatctgctcaaaagggaaaacctgaccccattgaccatcaccaccggaaaggcctttgagcacattcgcaaaggcatcaacctcctcgataatagcaggtatccaggttctaatattggtccgactgaatccggggttgaatctcgagcgccacatgtgccactcctccccgtgcatgtagttgaggtccctcccattcgaaatgggattcaaaaattctccttgcatgggagactttggcaagctgcttccaatctccatttgatttgatacatatgcctgtagggaaaatgccatcggtctggaaataggccatacgtcgaggtaaatgacagggggacattgttgctcatttggaaagaatttcggccagtatctgctgatatagaaaccaaaggtctgaatgaagttggcatcaaaggcccagtctctgtaaaattggattacgacgagaaaatgtcctaataaaatgagtgaggcaagattggcttgcgatgttagcttaggattcttttcggtgagataagagatgtacgatgccttgagactggagtcttctgaatttcattcttgcttgatatagctgcacggtaaacctgaatactagcactgccacaaccattatggtaagcaaagacattctctgtccttttcctaaatcactaagcctgggcgatagtagaaacggaagcatggctgccgtttcctgagatgaattattgttgggtgaccggaaggcggtcacccatgtgggtctagatcactagatagctccgctccctcttcctctctttctctctctctcctcgtccatcagatcttagcgaatccacactagttgctttcccttttcaggtataacgtagttagatataccattaggttataagtacttgtctctagctagtaaggactgctagcaacctctaaccctaagtcttttttcctagaccctacttcccggcgcttaacctatataacgcgcgtttcctaccaattagatttaatcctagtaaagccttaataataatagaattagtataccagctcttagtatagctaatagcagtattaactctagggataataacccgaataattagttataatttttactattaggtaataataatatatcttaggagataggaaatacctcttaaccctagactaatataatattattaggtaatagatataataagaagaatcaggctactaacctacctaatatctcggctataaaaatatagaaagttaaagtacttaagtataattctagaaatccttatagataggcgatccctattaagtttactcttatactattaaggctagaatatattattaatagtagtataccttactctactaagggtaacctaaaatttaatagataggagtactagttatatatagtagctagttagctttatatttaggttaataatatactctaagaataaatctagaatctcttatacctcctagaatttactgatataatatttaataaaattatattaatagtataaggctctgataaggctgaaaatatactaaataaaactaaaaagttcgataaaatgaaataagcggactttaatactataaaggaatttattatagaatactagaaataatactatattcttttataatttaaaatttaactataccctttttatatactattataagttctatagtaattagataaagaaatatctaaggtttaatttattattaaggagattagtaatattaaactaaagaaaattatactcgaaaagatagactagtattataagagcctctaggtagtttctaactaagaagggactgctaatatagcctagtccttaagggaatagggtaataactatagtagaggatatagaggataaggtactaagaggggtagtaaaggaggtaataataaaacctccttaagctaagaaaataaatctttaaaggatatatcgaccagaaataacgtacttctgtacattccttatatctagtggtatattagtagttagtagctatatatagcgattatataaatatatactaagatagatctcggaggagaacnnnnnnnnnnnnnnnnnnnttaatactataaaatctactattagtaggtattctaactagttatcctagttatatttaatatatagtcttaattactatactataaactaatttataatttcgctctagctatctatttataggtggtatatagtagatagtttctacttaatccctaggattttatagaactctatctaaaacttagagataaactatcccctttagtctaatataatagttttagggatccctataatctatataacgttatctataaatagatatactatctactttatattagtatctttataataggggattgatattagtctcttacttagttaattaataataataaatactatattatagctatatctatcctttaggaaggaatagaaatctattaataaatactactatagttatttaggaatcagtaataggtataggagactaggtatacgatctctctaggtctttatatatttatatattatatagttatctatatactactttatatctataacctattctaactaatagtatcttattataataagtttcttaagtttcttaattctagggtatatagttaatagttattagtatatcttattaagtaactatacttaaagatccctttcgttagagacttcgagatagtctttaaatagtagtaatctgtcttatactacctaatagggatccgtttcctatcttatagtctaatagaatacttttagcttagggctctagcggttcgctaactagacttattcggttatatctaagttctatatagtcttaactagtagagggagggcctttatatcctatatagattctatctataatagggatatctcgatttctagtattaatttcgttttttctccgaaatattccttagggagtaatataaggtattgactgatatctatataagggctttccttccttaaaagaatatctgcgataatattctgtttcctaggatagtatttaattataaagtagaattgtaagaggaacttactctactatacttattattaatttatctattatactattataaaatatttaagagactgataatctataaggatctcgaaatgttctatataagagagccctttaagttctagtcgctattcttaaagtatataaataatcgcgaggaattccttatccctgattttataattaagctctataggttatatagtctttaagaagaaggtaataggatactaaaaattgttagccttatgatattataagaggatagtactaatgactccgtttaaggtatctgtttctatataggtctagaggtcaggattataatactataggataggtatagttattaacttatactttaattatataaatacttacttacagtccggcgactatttatatactatattatactatataagataatataacagttttaaaaggaaactgtaatccttaataaattgttaatagaagttatagaatcctaagaaggattgtattcccttaattattaatagtatcttctagttcctaataactgcgatcttctctagatctactataataccatcggtacttataataaatcctaagaacttagttttctatatagagaatttatacttagatagtataacctataatcctactctttatagttatttaaggacttctctaatatacttcttatattcttcgagtatctcgctatagattataatattatctataaatataactgcgtagttgtctatatagtctctaagtactatatttataaattattagaatattataggactgttcgtaaggctaaacggagttactttatacttaaacgatctatattaggtatagaatattataagatcttctatagctagtgttaacctaatatagtagaaaccttagtagatattgagctttataaagaattttactttacttatttattagagtactttatcgataagaggtaacgggtaataatctttccttataattatatttaatctttagaagtctatatagaaacgtagactactacctagcttctttactattaagattagtaaagtatatagagctgaactaggaataataaatcctttcttaagattatcgaggatatactattttatagcttttagtttatctaataataatttatagagtaggtagtatcctagctatacttctgctttaaggataatattatggtctacccttaggtaatatagtagtagtttattagatttcttcttagagaatatttctataagattataatattcctataggagggttcgtttaatcttattaagttctatatcctttataatcgtagatttaatatctataatctaatcgattttatagagtaaggtctaaaagacttcgatatctttattaataactatttatatttataaatagttaaatcctatctaaccaataatactaatatctattagtaggagaacttcctttatttcttcttttagtatctctatttaaagaggtactagttcgattttattgttaaggttctattctatcttataatactctataacttactaatacctatattaatactcttttataatagggtatagcttctaagtctttaggtcctactatagattacttaaggcttattttttgaagagataattatattattctatatccttctagtaatctaacttaatttatatagaccgcttaaggattgttataagtataggtatagctaactagcctactaccttattaaaaagggtatttttatctagctagattatataataccgttagtagttaaggaagatatcgttctctacgaactatatatatctaataatcatattatattagcttagatctactactaatataggaatctactactagatctaattatctatacttagtataagaataatagtatatataataggttataataatttactgttaaatcctctaactaggtacttatagtctagtttatagatatataacctaaatttcttactaagtagtataactagttctatattaataaatattaaactatctgctctaatatctactagcgctaagattataaaggaatatctattataagtcagtcttatattaaatactaagctatcttataaacctcctaaaagcttatatagatctagtatatatagtaatacctattttctacctaagattaagacttctcctaggctcctacttttcttaggtctatattatcctctaattcttcgagtttaattatatataattagctataggtctagttagttgtagtaatagcgcttacagctgcgtttgcctttttctttaggtactcgaacgttatataccccttttccttataataaaagtattaaccctcctttataagagtctcttgctctatagctaatagtctagataataaggtagtccctttatattttatatatagggtaaaaccggactagttagcagtagtcctaactctacttctaaatatagttattatatagatatatatagtgccctttacttcctattagagactaatcttataggatatactttagtaactctaggtaaaggtatcgaaaggaaccgtttcttaattaatagtctatataacttaactctataatagatatagaagttttaaatataggttatacttatagttttttttaataactatggcttcttctataagctatataaatttagctaagaagtcggtaaagtcttccttaggttttatcttaagtttatagtaggctgtatatacttctatataataatttaggtttataaagatagtatagaggtagataataatatcttctgtgttagtatataggttatttaaggttatacttattcttagggtaatatatagctatactttacctttatattggctttatatatatagtttccagtagactagtaataggtaatagttagtatttactttgagcttctatctaataactgtctcctatatttcgaaacggacttcctttctatcctttaatattagtatattaggtatctttgtagacttctaactagtgactcctataattagtatattactttaggtttagtttatttcgctctaagtaagaataaggtaataggtaaggttatcgcgcttatatatagcgatatctctgtaggtagtagccttattatattcttcggtagcttggttatattctgttataagataatctttctctatatagagttaatcatattcttctataagtcgatcacattcttctgtaatttatctaatagcttccttagaccttctgttctctaagattaagacctagatttcgttatatattatctagttattatcttcgactatttagaactaattagctagcttaaggaattgttccttactaggagttatatatataatcttatagatagaaagagtcgaaggactctctttagggctattgtatttaatactcttaattaggtcctgtgttttagtaggagtcggggttttaggattagtagcttcttctacgagataatctagtactacgggttattttcccttaccgatcgcggtaatctattatggtaggactataactggtcctattctagttagtttcgggataggtagggtgaaactggactaggataaattgtaataattatctatatagtcgtacggctttagaagtttgggtttagggtgatacttaatattatattatatgctagattccttttaataaaagaagtgcatttctaatcgaatattaagtatggaaaaggaaaagaaaagaaataaacgtaaaaataataaatgggcttttatacccctttaggggcaaagccctattctcgtttcccctagaaggaaggtgcgactgcctgcgcaaacgactaatagtacaatcccaaacgggaaagtatgagtcccacaagtgccaatcgtgatagtatataaggataatatataggtttataggtcatataacctaaggaggctgtataggtagtatatattactcctatctagtctacagtcccccacgtacccaggataggtgctccacgccctatgacagggcttatacctcaggcatcagccttcttagtactggggtcctgacaatagtatatataacgaggtccatatatagtatagttatataactgtgctaagaaatcaggtagccatagtctctaactgatgggactacagtgtagtgatgcaattgaagagggagagagttgtcaattcctaaagggcagaatgcctaactatctagttatgggggttggtgcctgccgtaccgggctgatggtcaggtgaccaccatatccaacacacccccaggtataatcccgaggaatgcactcgtctgtttatttgttatggttttttttttttttttcattaggcagaaaccgtatcgtctagtaaaaactgccattactattattaataaaacaaaatgaattccagtgctttaaaatttgtataacgtatatatactatactgaagtgcaccttatcactgtatcaaggaaatctatcagaaatgcaaggacgattatgtagcccatagcatagctgttgaaactgagcctgaactttgaaggttagtgagactggaatagagatccataatccattggacacaagggaggaccgcttgcttctaggaggaccaggtctgcaatgatacagcaactcttttttttttttttttttttttttattgggtagaaactgtattatccagtaaaaactgctattactattattattaatttttttttttttttttcgatattaagttattttatctaacttttacctcgttaggtttccttattaggtatcttggctattatcttcttccttattggtttaaaaagctcccgcgccagtggctttattagggtatctacaatattttgcgtacttacgataagtttgagtttaataatcccttctctaactatatgcttaataaagtggtatctagtatctacctactttattccttttaagtagttatccttttttataatagatactatattattactatctgagtagatagtaattagtagtttctgttattttcctatctaatctataatctttaggaactatatatactcgcgaattacggtattaaaggtaatatactctactactatactacttctagcgataatttcttctttcttagaggactagctgataggtcccccggtatagtaaaagataaataccttagtgcttttgctatccttataattataatacaatatattaatatatctaattagactagtcgataggtctttcctaagaaggatacctaggtctattatccccttaatatatctattcagctatttaagtgtatcgatatcctcttctcttagggcagaggctcttctctagagtttattaactataagggtaatattaggtctcgatttatcggttagctaccctagcttaccgatatcttcgataaatcttttcgcttcctcttttataacctagggttaatcttcttcgagatcattctctatcttccttatatctttatcttcttttaagttcgtgatatctagagacttatatattatttttattaggagatagacttatactacgctctgtaagccagcttttataataatctcctctatataggcctattaatttaagaatattccgagttttccttaggagaggctgctccctagaaatcgatctaattttcctagattatagtacttaaaggggattttatctttaaactatttgattccttctttatttaataacgcgattagagtattatctatatagagtagaatctagatatttagttccttatagactataatgtagggtttattaactagtggtttaaatcctatcttttttagtacttctgcgattatactatactaaagatagcctacctaccggagtctatatattacttatagaaggaagtagacctccttttcttagtttaggttatttttcttaaaccctactagctactatataaaaataatataattatcgataatcgcgtttagatatactatagtataatcgacctatttaagaaatatattatttacaaccactatactaagaaacagtcttattatctctccttatataattagtatataatttttatcgaaattaatccctagtctttacctatttctatagactacctagtgcgctctaaactcttagactatattctctttatcgatcttaaggttaaagatctatttccttaataggattattactctagcgggtagttacttaataattttatatatcttagctacttttagcttttcgatttacatttctattatagtatactattagtctttctacttcgatactatagcctctatatatatctaagggatcttaacgttctataacttaagttattatcctattagaggtagggtaattgttccttattctagtcctttttcggtagataatagagtaaaacctaccctaaaaggtaaatttatctagtaatccttaggtactagtcctatctccttatctctatttatagtatattataatcctccttctctactctagttatatactctatactttccctattttatattattatagtatttaggtaggtaaccttttatagatcttttggatcggtataatagttatagtaggtcgaggtatatagggtttgtattaacctatcttatttctagttatcttaatagtattagtataggaaacagtgagtttagttctttaaatactcctagaagaggtaggtatatcactagttctttataaataattctagattatagaagtgatatttattaagtaggttaagctagtatctctagtactctttatataagtacttatactctatcttcgagtgattcttcctatagaacttccttatcgatattatagaatagtttagtgtcctctatatttatagagtttatcttagagtcttattaatactcttcccttaggttagtatactctacaattatcctaaggtaaagattttagaaattttttaatagtatttctattactactcttatatttttaaagagtagttctcctattataaattatattttctttactagaaggctatcgataatctcttctcctatcttaatttcgttagttctattatatatcctaggaattcttatttcctaaaaaataacgtctctatatatcgaaactttctttattttaggattatagatatagtaatagtacctattatctcctttatatcctataaggtatccaatctatactctaggatctatctttattccttatatttaagtttcttttagtttatagatatatactttagagtactatactcagagaaacaataggtttattacctcttagtctccttataggtttattacttttctctaagtaagtattaggactttaccccttaaacgagctagtcggttaataatatataccgctatagttactacttcggtctatagttctattaaagtaattcctatattgatatatattatccttactatctatataatatagtaaccactatatttagaaactctgttctattcgtaggtatatagtattaaggtactaacagttatcgatacagtttttacctaaatagtaaaataaaaaaattcctttctattattatatctctattctattaggtagtaaccggtatatcgtttaaactattcggtctatatcttaagagttaataatatattacttttcttagatatatagagtataacttaaaatctagatatattgtctataataattatcgtatattctttatcgattttattatctttaccgattccttttagtttaatagggtataggtcgatataaagtagttacctaacttttattacccttacttactagtcttaggaaatgattttcttagacttcccttttctatataatttgtaatcaaaatatttggtattaatattatatcctagcttatccttattaacttatcctttatagcttcctatatatctaagtctccggtatataagtttagctaagattaggatatatactagaccttctccttctttataatagatagggtaaggcttatccgctagttcgataataggaatattctttataataaacgtataccctattacttattaattactatctttaattactatattattaggattctatcttatcccttaatcctagtgtatttttattagactaaggagattgaacttattccctggcttatatatataatagacgcgtagtttatatcttattccgtttagtttctagattagtaatataatatcgctatagccttctgcgactacttactgtctagtacttgaatcctaactaattgctattcctagtttatatatttcgaatataataaaaagttctctgttcgagtagatatactaagaagatcctaaattaagtatctaatcgatactattctagaggagttatattagtttatttactattactattctgctaaagctctctttatcttatactattactatttctccgaaattgtagtttcctttattagtggttgctaatatagcgatagtattaaagtttacctattatatctaatcggtaggcttcctactaacctattaactcttatttttataaaattagcttaatatcttctagtactataggctaagcttcggcttccagttttatagtctttcgtctactactagatagaaataatcttttatattataaccctattccctatagtaggaatagttcctattagtagtatattatatcttatagtttctctattcttcgatatactttcttatatattttctatatagtagagtattagttaacttagtctttttacttaagatttagcagttattctactatccctttagtacttttattaccgatactaatatactactattaatattaaactctttgaccttatcctatatttctaagtaatataggaagaaatcttagattattatttctactatagggtttttgattgatttaagtttattatttttaattttaattaagcttcgaagttctataatctcctatagttagtttactataataataatcgcttagtatagtggtatagtagcttttagattgttagctatcttaaactgttattttagtatattaataaactctattattattaagaaatctattctctttattccgataaattgaatgattatagcacttagggctctgtgtccttccccttatatatatagcttatacttatatataaagttattagcctattttattcttttcccacttaatataatatatttagcgatatctaggtcgatatatagttatagctaggtactgacttatatacttagttttatctaagtcttagtattagcggtatctcagtctagtctctcgatgtttttatcgattaaccggtataaactataacttttaagaatcttagtcactattctaagctaattatcgaaatcttctttttcctttaggagtagttctatcttatataagacaaagctactaatagctaggagaccttcactctagtctcctattaagtataaggtatcttctaccttatcctaatctttattttttagtatactaacccctataagaggttggttggctgtttatactagtcctatactatttcctagatctgctattataagcgatctcttatagagttaggattattgtattattaaaaaatgttaatctttttctcaatcgggtggtagtattcttagattaatccgtttttgtagggccggcgaatttttgatttatcgcgttatacgttctacagcggtccgtcctaccaattgtattgttttgtctagtcgcgactctctctgcgtgagtcagacttcgttttaattaatgaatgaagatgcctctttactgcaatgattttagcttgaaaagcaggggtcttataacctgtgactccgtcaacacgcgccggtctgtattcactcaagcctactaccggagtccaggatactactggattatatactgatgcgactacagtgtagtgatgcgattgaagagggagagagttgtcaattcctaaagggcagaatgcctaactatctagttataggggttggtgcctgccgcaccgggctgatggtcaggtgaccaccatgtccaacactaacgaatacagtatattagttggcctataaactcaggtatcttatatacgtaaggtctggctgagcagttgtttactagtaagagtatatagttaggataaagggagataccatacctatatatacccagggtgtaccccaatttattattacctaatagtaaaaattgtgattaattattcgggttattatccctagagtcgatactactattagctatactaagagctagtatactaattctattattaattaaggcttacctagatcaaatcccattagcaaaaaacgtgtgttatataggttgagcgccgggaagtagggtctaggaaaaaagacttagggttagaggctgctagcggtccttattagctagagacaagtgctcataacctaataacgcatctaactacgttatgcctgaaaaggggaaaacaactagtatagattcgctaagatctaatagacgaggagagagaaagagagaggaagagggagcggagctatctagtgatctagacccatataggtgaccgccttccggtcacccaacaaaaagtgagggaaagggaggagtagcagcgaagacgggtcttttatgtcggcggcattgaaggtaggttacgtgacagcgtattggggcgctaaacccaaaaaggcaaaactaacctaatacagtaattcacaggtccgccgtttacaatatcaatctcatacttacaaagtacgaacgccaattcaacactccgtatgcagtatagattctccatctcttgcttggatatactaagtttaggtttctagtccatggatatatgcaaacacggtatggatcgtggtatgttcttgttgagccacgtcagatattcttggcagcatgatatccatcttgtatacatccagtactgaattttggtggattgaaaatcctcgagccccctatcttccacactggttcccttgagattgaaactgttttcctcgagtgcagaagattctcctgaattaggaagtacaatttgaccttaaacattctgttttattatacctccaccggcgggtctaaacactttcaagaaacgatcagattttagcagagaacatcaacataatcataggttttaggacatcctggcgttctctttttcgagtatagtgattatttggagccgtgagaccgatgataccaatgaacgtccgatttgagaccctcgtttatgcacgtctgcttcatcttaatcagttcgttggtatagactctcgggcctcgtcgatatctcaatacctagatccacatgggccttttgggagagttgcatgggccatcaaagtctatggggatatctatgtctacgtagtcacaatctatcatgtacatactaaccctcaacgatccccatctaacataaaaggctccatgttaccttcaatatgagacattctctcatacagtcccattttaacaaccagaacaacctaaacctttttacacaagatgcaagtggcatcttcttcttccgctgtcccagccattccttccgtatacgagaccgtgcaaggctacaaggtccccgtcttcttttcgtgctaccccgccggaatcagcattgccgctcgcaaagtcgaagatgcccttagaaaaatcgacgaggaagcatccgaggaaggtacacgggaaagacgtcgagcagtaatccgacacaccaacccctacggtaacccctttactatttgccactgctcggcgcctttccagacagattagttctgttgtctacgctggtcgaagtaatgtggatccatgatggtgagaccctaatgtgctcggcatatatgtagtagtgtgctcacgacggaactatctacagacgtgacagaggagatggatcatatctcagtaagaccactagaagtttgtaaatggataacccattaacagtttacaggcatgccgagaacacgacgagctggcaaaagttcttcaaatcgacattgacccatcgatcttcgaggctggaaatgtgcgccaaaaggcgctggcggtcgtgctccgaaaggcaatcgacatcgaccctaagcaagcccccgatatgatcgagatgctcagaaaatacctggcaacattcgacaacatcggtggcgacttcacgcgaatggaggagtatatgccctaccggatctccaactgcggctactggtaagatctgtacccttctaagaaaatacatggtaaatgtctgttttatcatcaaggatgtcctcttacttcatccgctggggaatggatatgaccctcagtgaggaggactacgccagcatcgagcaattcgacattgcaatggggaatgtcctcggtctgactaatgactacttcagttggaatatcgagaaagaccaggagacagatcgggtgagaaatggagtggtggttctgatgaaggaatatcataccacggcggatgcggcaaagatgattcttcttggtgttattgtcgaacaggagtccctggctgcaaagctcaaggaggaaagattgaagaagccggcttcaaaggagatcttgcaatatttcgaggctattgaactttatgttggtggaagctgctattggcattcgactgcgcctcggtatcaggtctttgaatgaaggtagataaagacactggtgcaactctgaggtacattttatagaggaatagatttgtctagtaaaggtcacggactttcatcgactatcatctacgtcgaatatagatgcattaaaaccaatcgatggctgaaaaatgaatcagattaatatacaataaatgaagaagacacgctgcatcgaaatagacaacaaaaatcctcctcgtagtaatttcatagatttcaaatccatattccctcaagaggattcgggataaagaattcgcaacccagatgagctgcttcaccatgagcctggagctccctcagaatctgttctccggggtgaggcccatcggtaagattctccttgacatgaattatgtaaatcttcaatccttccagaggaggatcagtatcagcccaagtcccagagtccggacttcgcagaacatccccaaggtccactttaggtatctgaggaatttccaccgactctctcggaagcggacgagactcaacaagtgactcgggcgtcctgcccttatcggcaaaggagcttagagtccgtttcgagcgcgggctcacttgctcgctgccggtctcgaccgggtctgcgggttcgcgcttgcgctttttatcacccctgttggaatcccgcacttccatgacccttctggctagcgcggtgagctcggagactagatgtcgtggacacatgtggccgtacagatatgagtcgtcggtgctgtcattgtaggagcattcgatgaagatcgctcgtagcttgcccgtggcgattttcggggcggcggcttcccatactcgtttgttgtgcgttcccagggaaactgcatccggctcgacgtcgccgaagacgatgatctcggagccgctgtaatgatcgcgcaggaagaaggcagagctttcgactgtttccatcactggctctttggatttggatgggagtagatgtggggagcgagcgggagaatagaaactggcaacggttaggaaattttcgtgtacaaattgcgaatttcagcttacctgccatcggtatggtccactgaaatcgcccttgagggaaacatcaagtggtgatcagaaaagacggtactcccgacgcgatgaggccccccgttttctggatggtatcgctgcttgcaccggccgtggctcacgctcaagcattttgtcaataggccattacaagccctgacatagcctctactatcgccacgaccgaaacgagggtttccaccttccaccaagcgctgatatgtgagtagaccagcgccgccatcctcgtcagacaagttaggccagatgacatcgttgaacatgtggttcttgatagcggatagcacggatggcaaagcggccacaggctttgggccattacccgcctccagaatcggggtgttaatcgccagtcctgagatatgatctagatgagggtgtgtgatgagaacagcaccgatgatttcgcgaaatacatgcgctgcatttgcctgtgctgttctgcagggtagctcaagcccttgaaagggcccacttgtcatcaccccccgatcatccttgcattcggggagaaaccgttccatcaatcgaataattcctgcaagaagggtacccgcatccacggctaccactgagttaggagaccatttcgttgacgttgaccggacaagaatgcctgtgacgcagtcttcgcgaggtccacctgtcgggccctgaggggatcagcatccagaaaagaagcagttgcagggctccgtctgctagaacccgccatcaggcaagctgcgaaaagaacattccatcgccaagatatctacgaaagctcgacatccggccctgcacgtgacgggttctgcaacggaagcgaaacaaatcaacgggtcctgacttaccaagacaatgacgtggaatgctgggttctcagccattgttccacttgtcccgcccgtcatggacatgtgagacacgcgataagctagacttgtcacagcccaagagcaagtgaagctgcccgagcgcgtctaatccccaatagtagacgggtcccgacaacaaaatgtttcacaaaggctcaaatgagttggtcgatggtcgaatcaaggatatgagaggcggctaataaagactgaaaaaaaaaaaaatgaagaagagattacgtcgcgatgcgatatcagcgcccacgggttgggattcggactgctcaaatatgtatgttcaaactgacagcgctctgcatatcatgtgtcatgcacagagcggtctatctccaggaagcagagttggtcctagtagggagagagagtgacaggcgcgaagcgacagaaatccggaggctggctgagtgcagataagagaactccgatttcgcgggggtggagatttccccttgtaccacaatggtatcacaatgtggtgcgcaagacactaatgcacgtaaactgcagtgccgattggaggatattttagaaagcaaagagacgttcgatcggagacaccgggagtggacctggtggattctagtggggtatgatctcaacggagccacggattcggaatgaagatctggggtttagtgagatatcagatcaaggggagacgtctgagggcagcatcagagggagttgattttgggcgatgatgttcacactacgattcatacattacacaacagattcagatggctcgagatatacattgttagtgatcagcgtatgacctgtcaatagatctgctgaatttcaagtagatgtacagaattaacataaagagggtatgcggtcaaggacaaggatagcaaaacgactgtgcccttatacatgaattcattgaatgactccccaaaggtaagggatgatatggacacagtccattccaatccagacagaaagcatttcacaaaaaccaaggatctgccttcgccgactgctataacgccttccgtgagcccgctaaataaaacaacaaagaaatgatcagacaaagcccatcatgcgccacaagatatgttcaaaagcaaagggggaatagatgttgcatcaggaccgatcgttggcctctgaattttgttcattcaagtctctctccaccacagtctggtagcttggtagaagttgaccatcatttgatggacagttggggtcgtcagaagacccaaaattagggggacattcacgagagacatcactgccccggcgactgccgtcgggactagaatattctgggggcggggcctctggctcttgattctcgggagctgccgcaccttggccctctgtctcggccaaagcaaaccggctggagccctcgccagcatcttcatgggaagaaatgtgggtcagctgggcgagggaaatgtcagtcggtgatcgagaaggacctgggctaggcgccaggggaatcctaacacttgagcctgaggtcgcgtagtttgcattctggtaaacgcgttgggagatctgagccgcactctcacggccggactcaagtagaatgctgccttgttcactgccatagggtgggggcggtgcgaggctaccagtcatgggagccaagccccattttttgacattgccttcgatgaatacaaatcccatttggccaaagttcacatggatagtgcaaggcccgttggcaccgatggtggggaagaggttttgggagcgatagttgtgagccacatcttccaatttcttgccgttgcgtgtgaagaagacggtgccggatcgaggtcggtagcctacaccaacaacatcgccctgaaggagtggaggcccgtatggagtgggggtaaatggttgattgagtcgacgatgtcccgtagattggtaggcaacagaggttttatggaagcctagcggttgttagcgggaattcctcggcagaaacacttctgcaacacataccaggcattcggaataggggatatggtttcgtagtcacaccgatgccgatcatagtcgattcaggcttgtcgtatatctttgcctcccagtagtaaacatcattctgcttagggattggcaggttggtctgtacactgcactccgagtcgaaaaactcaatttctgttcgtccttccacaaagcagtttgcaatttccagctctggttggaattcccaggcggatacacccttttcttggattgcgaggaactgcgatagggagatgtcggtttgcaaggactcgggagggtttccttggacaaaggctgcagacgattagcaaaatgatcaagcgactcgcacgaaaattcatctccagtcttaccttttgctcgcaaatactccgatcgcgccaagtcatccattgactctagagccacctcttcctcgcgcaagaaggcctgctcgtcatcgtattcaccgggcctgccaatgcgatcgagcataatccgcccccggcgggtatatttgaaaaagaaaaagatcgctagaacaacaaatgcgacggcagctgagccaaatgcagacaagatcccaatcaagatgcctttgccggttgacccgctcgagttgccacttgccagcataggctcgggacgaaactccatcgacaaagaggacagcacattttgtagattcgcttggatttgttgccgcgagagtgacagatcgctttgaatgggtgtcggtgatggtagtgtcgaggagacaaagccaatcggtgacgtcgtcgggttgcctattaccgtgctcagggttgatggcaggcctgcgagcgcatcggggctcgaagcctcaagaccctgcatcgttcatgtgtcaagtgacagcacaaagaagaagaaaaaaaaatcacgagaagtcgggaagtagtgagtgaagtgtgcaaagaggaggcgagagagagagagagataagtgggcgggatgaaatgggcgggttccaagttatctaagacgttttcggccgtggactagagccatgcactaacaatgcaaggcaatgtatgttgagagttggttcctggactgaagatccgggattctagaatgttgaaagaatctatgtctttgtgtctttgtcttagagaaactaacttttcatttagaaatagctgtgatattagtactccgtatgttgtagtgtcaccgatatgtctatctatccctaggataagcccttctctcctcttcccctctcctagctccttactggaatccctctctcccctctctttataccattccttagattcgaagatgcgtgcaaatagaggtgcccaggggtctacggctcaggacgtcatgatcagttccctcgactcctataatatccgcgtagtgacacctacctcctgcgataaatacccaggtcagtacacttctccctagagcgaacattgcaaggtcggaatgccttcatttgccttcatttgccctcctttactttctcacatacctgtttgctactccaccgaacccccgatcggtgatcgtgagactcgagctgacttgaccgcccagccaagcaccatgcacgtaacgtcgcccggaagcttggagcttcgagtggcttgatctttctctccggacagcccacaattaatctgcgcgactccgatcaatcgcgcccattccgacaacgacgatacttctactacctgagcggagtcgacgagcccgactgcttcctgacgtacgatatcgaacaagacctgttaactctttatgtcccggatttcgacctccgccatgctatttggatgggaccgaccctctcacgggaggatgcgcaagaccgatatgacgtggaccatgtacggtatcagagctcgctcaaatatgagctgcaggcgtggctggacaagcggaagcagggcagcgagctgtacctaatccatgactcagaaaagcccgagcatctaccaaaagacctgcctctgaatgtggaacagctcgggcctgctatggacgcagcccgaggcgtcaaggacgagtatgaaatccggatgatccgccaggccaacaaagtctcgggacttgcccatcggcgaatcctggagaatatccagactatgtccaacgagtcgcagattgaagggtcgttcttgaatacctgtatctcgcacggcgcccggaaccaggcataccagattatcgcagcatcggggcccaacgcggctgtcctgcactacgaccgaaataacgaacctctcagcaagaaaccccttgtctgtctcgacgccggcgcagagtggaactgctatgcaagtgatgtgacgcggaccttcccgcttaccggcgagtggcccagcgactacgtgcgggatatctataagctggtcgagcggatgcaagaggagtgcatccagctgattcgaaaagggacgcgctatctatctctccacgatcttgctcatgacatcgcgatcgagggtctcctggctctgggcgtgttgaagaacggcacgaatctcgagatccgccaatccggcgcatccaaagtattcttcccgcacggtttgggtcatcatgtcggccttgaagtccacgacgtgtcggagcggtcgatcatggctcttcaccaggggttcgatcagcttcagtatcgcccgatcttggactctacctgtctttcgccgtgcactctttccgccccgctgctggaagagggaatggttgtgaccgttgagccagggctctatttctcttctctggctttagccaacgcgcgccaccagccgtctgcccggtacattgatttcgacgttgcggaaaaatacgttcatattggtggagtgcgcattgaggatgatattctcgtgactgcgactgggtacgagaacctcaccactgcgccaaagggcgaggaaatgcttgccatcattagaggatctgcatagtgtagtattaagtacgttaaatagcggagatatccattcgtattaggttcaacaggctacaatctatcccgtttccgttgggcactacatagaatgtgagccctatgtgggagttacaagacctggtcgggcacaactaaagaaaatatcacaccgccagttttgtagacttggcagcaagctaacggatgtccaaagtgtcactatacaagaccataaacaaagccagctaagacgggccgcatcgcaacccaggattgcatcgggactcggcaatcctaggggtaggatagatagtacaacataggatatggcacgtaaagcgttacacgagatcgggagatcggcagatcacatccatggatgaattcaaagtggataataacatctacgatagactgaacgaaccagcggagtgcaatagtggcaatatttctcccttgattggaggaggattatggagttaatgtgcatactccgtacgtcaatcttttattcactctatttctatttctgggcaatttattattatcacatttcaccatgttgggtggagaagggtaactatattctatatgaggcaaatatgcaaatatgcagttgaatgtcgactagcgcgtttagaactaaatatccctcatttctttagagttcggagaccgtagcggtactttgtacaattccatgcacttctccgggtatcgctgctcgcatcaacgctaacgtcattgcccctccatagtatagccggatttcccgagtttatcgggtttcatatcccggccatttctcgcacccgagagcggctgtgactcttattccctcatatcttatgtatgttgtacaatattatcctctgttatgcggcggtattgactcatttataattggtttaaatagtataattaaaggctgcaagtggaggaaatacgacatgcagcacagaaaagacgtaataatgatatgtattattatagccgaaagctatagttagaccggtccacactcatttaccagaggaacgtgcccgttgagtagaattagaaatcagaagtcaggtgggctattagaaatggatatggatatcctctttgattgatatattgtatgaatacaaatcgagtctgtgtattttaagcaaaagcaaaagacgagccactccgaactggtctatgaaagcaaacgctcataaaaaaaagactccgtaattccataactgcaaccaaggccgcaaaacaaaaagtgaatgagttttgtcgcctgcatctttgtacatctcatcagcatcagaaaggccgttcccggacgcattttatggcacagtaactggaggtctatctcggacttgacccggagaaacctgcatgggagggagaagaagtgttgtcatcgggtccgacgtgtgaagggccaccgctcgaggatgggtcagacagtgcaggtggtggttgacatgcaggtgattttgttcagtggctccaggtcatcggtttcgattcgcgcttcatattcattggggcttggccagttgtgacagcttatcagcctggtgcagcagcttgtgttgttccaatacgcgttggtgttcatatttcaggagcttgaactggtcgtctagttcatggtgccatgggtataggacgaagacttggaatgccagcgctgacgaggcgactccgaagttgatgagagagattccgcgcgtgacccacatggtggaggatattgagactacttgatcagtaactagcttgcgaatgagtgaataagagactcactgtaaagaaagaaatgtacttattagacgttgggtaaagcgccgaggatgagtgatgagatgtagagcagatgaagagcagagacgggtcttgaagggatataagtaggaacaaaagggggcaaagtcgaattttctcgttccttaaatttgacttgcagccttttcggtataaacataattcgatttcggcaggaaccccgatcagtggacctgcgaatcaacgcccaatccggttagagtggagaaaaagtggagccgtatcgtggcggcaaaaggtttccccgacccaaattcttatctgtcggagatggatcgtatcagtcggatccgaagagataagaaagagcagttcaattaaacttacaactcactgtgtttgtgtctcttggaacctcctaagaagaaattgatcatcgagagtaagtgattcctgagtgtcttggactaagaatactactaacgactgcctcagccttgatcgccctctcccagcctctatacactgtccaagccgaccactacatccaaaatggacaaccaaccgagtgtaacgcagcagctgtttggctgggtaaggaaaaacaaatactcgctagctggcgccaccttcgtcgccagcatggtcggttcctttgtgatggtcggtcgcaacccgcatctgacgagcaaacaaaagatcgtgcaggctcgtgtgtatgcgcagggtctaacgctagctgtcattgtttccttggccgcccttgacatgtcagaccgacgaaagccagcgccgcggaaggaagcggtcaagctggctgatgcatagagctagactgtgatttccagccatcatagacgggggtatagacggggagatatagagatgtcgatatgtatttgtatattacagcctacaacatagaggtctaacaaaccagacaaaatcaactcttagatgcgatgtctaattgttcggtactcaattagactctcaaattatgcatacgttgaattcgtgcatcttcaagtcattgaaagcggtttgcttttgatacgcgttggttgattacagccaagacgaagacatatgcctagtagcattgtcgttatattaattcctcggaccgaggtccttctatgactcagacgaacagcggtatcatcatggcttcggccgaggctaccaacaatggaaggacatggaaatcctatcttgtgtgacggggtaaatagtatccatgataaaggagcttatactttggaaagaaggatgctgtaaaatgcgagaagcgcaaagaaacatgtgagaagtcagccctatttaaagatttgcacgtgtcaaggatgtctatgttgtacaaagatatttcatcaaacgaagtcatagaagactaaagagcaacaaaagatagttagtccgaaatctaaacaacatgaaaccctttgttctattattataattcaataatatatccgagatatccattagcccctctcttccattgctacccgcttagccggacgatctccctttctactgcttattcacagtagtacctgattaaaggggaaatacctcttcgaatagtcgacagtaagcagcttagactcaaagaccgggacaatgatgtcttcgtactcatctccgggtatttaggggctaactatacagtatatatatactaagaccactaacatcccaaagccacatactctgttatttattccatctcgttatccactttctgcatattcccaacaatcttctgctcctgtttaccgccccaagtatacgaagcagccctgaattttgcattttcaatccactgatcacgaagtatgaagaatctgtgtaatcagaaagggtgatcactacaaacttcgaccgggcttctcacagtttgccattttgttaacttgcaaggtatacctgatgcggaagttgcaaaacatcctcctggttgagtggttcattaacacccaaatcaagaataaaccatcttttaagaggatccggtgagtcgaagtcagctgggatatggatgtggtcatagcccgccgggtgaagtgtaggattgaatgctcgattcaatatattttcacagaaatcttccccaatttcgacgtggcgccgttgggggcaaccgtctatatcggtgatgcaggcgtaaatgactattctagtgggatggaaacccatatcaagagtgaagaataaggcgagaaagccgttttgttcggatgttgcgcttcagatgagtttagatagacgctaactatttaattatgaggggttagaatctagatgccccgtggctagtgggttgctgtggctggtcgagtgtggctttcagatgagtgttcatgcaattagatccatgccgccttatgaccctgcagtatgcacaaagaccaatgaaggttccaaggttgatatcgagagaaactttatttcaagaggacttgaaacgcagagggaaggagcgccgtataggatcgccgagcagagacacctcccagcttcaaggcatggctaggaacatcttgacgtatgcgatatttctatatgattagtctgatccatggcatcttagtatgactgggcagtcaaacctacaccataaatgggatacgaataagagcagatcaaaggcaaaacaaagctgaaacaggagtataccgccatcatcgatgtaaccgaaccgtgaataagcggcgccgatgattggatttatgtcatcggcgccgatgtcggagttggtggggttggatcttgaaattcacacccgcctttatattctgaagctccctacctgtaatcgagtcaatcattcctcttgatactattgcataatggcttcttacaatattgttgttttcggtggtgaccactgtggccctgaggtatgtcattggaacattgaacgctcgcggggaatcgaatacaggactgacatagaataggtgaccgctgagggtgtcaaggtaacattgcaagctggaattgggaaagcgcggaatagatgtactaattgaatcccagatcctccgcgtcattgagaagtcccgtggtcttactttcaacctgcaggagcacctgctcggtggtgtgagtatacaccacctacgcgacaaacgccaatgactaacaattacaggcctccatcgatgccaccggctcacccttgaccgacgaggccttgaacgcagccaagaacgccgatgccgttctcctcggtgccattggcggtcccgtacgtctctattctccccccccccccnnnnnnnnnnnnnnnnnnnnnnnnnnnnnnnnnnnnnnnnnnnnnnnnnnnnnnnnnnnnnnnnnnnnnnnnnnnnnnnnnnnnnnnnnnnnnnnnnnnnnnnnnnnnnnnnnnnnnnnnnnnnnnnnnnnnnnnnnnnnnnnnnnnnnnnnnnnnnnnnnnnnnnnnnnnnnnnnnnnnnnnnnnnnnnnnnnnnnnnnnnnnnccaccccgcacaactaagaacaagcctactcacactgcatacagaaatggggcaccggcgccgtgcgcccagaacagggtatcctcagactgcgcaaggaaatgggcacattcggcaacctgcggccctgcaacttcgccgcgccctcgctagtcgacagctccccgctcaaggccgacgtctgccgcggagtcgacttcaacatcatccgtgagctgacgggcggcatctacttcggcgagcgcacggaggacgacgggtccggatacgccatggacaccgagccctactcgcgccacgagatcgagcgcatcatccgtctcgccgccaccctcgctctgcaacacaacccgcccctgcctgtctggagcttggacaaggctaacgtcctcgctaccagtcggctgtggcgaaaggtcgtcactgagatcatggagaaggagtacccccagctcactatcggtcaccatctcattgattcggctgctatgctgatgatcaaggacccccgtaagctgaacggtattgttgttaccagcaacttgttcggtgatatcattagcgatgaggctagtgtcatccccggctctctgggtctgcttcccagtgctagtttgagcggtattcccgatggcaagagccgtgtcaacggtatctacgagcctattcacggtatgtgttatgtcctctttgctgctttctgccattggttctggtggctaattggttctacaggctctgcccctgatattgctggcaagggtatcgttaaccctatcgctactatcctgtccgtggccatgatgatgcagtactccttcaacatgatcgacgtggctcgcgtgattgagcaggctgtgagcaacgtcatcgaggctggtgtccgcactggcgacatcggcggcacagctaagactaccgaggtcggtgatgccgtcgccgccgagctggagaagctgctcaagtagatacaaagcagcctcttcgatgtttctatatgagatatgactagcatagaaaactaaaaatttcaatacccggtttaaaatgcaacatgtatttcacgggcgaaaatatgcctaatgatgttcattcgccggcccaaacccatgcaatcaatgcaaaataattggtatcatgaagacaatgaaactccgataataaaacctccgttggcattttacaaaccaaacaatgccggtacttttgttccttcaaaaaagcccttatcgaatcactggctcacccatccaatccggctcgtctagaccggtggtagtaaatccagtatcggcatcttcactagcggtacgtccccgaagatcatgagctccacgtagggacggacgacggcgccgagcatcagcagaagccgacggcgcagcagccatcttccggcgactatcatcacaagcaaagacctggaatccacgaacatgagtatcctttccgttctgatggttctccatgatgcgcatctggataaccatcgccttgagcacattcccagaatagggatcctccccatcgtcctggctatcgggctcatcaatctcataaaacggatcacactcatcatcatgctcatggccagggtcatcacagttccggtacacgattgtgcgccgacgcatactagtcgtagatcggcgtttcgacttcccagtgtcgttgcgcacccatccaccgtttcgaccgccgacgccctccagcggcacattgacccagccgcatggaccgtcgccttcccaggttgcgaactcgatgaggtcgttcccgcccattcccgctgcgaaaatcatcttggtgggcgtgtagctttcgtcgagctcgaaatccaggtatacgcggatgcgcacgactgctaccagtttgaagaagtggagggttaatgtgtgtggttgtggtccgtcggattgccagtattgggccggggaagggttgcggagggccgcgacgccgcagcccggcttggaggtagagacggtccaggaagcgagcgatgagatctcacgtaggttgggtggtaagggggagggtgatttttctgtagcgcgagaatattagcttgcaatgaatcgtagctgtgagggaacagtacctcgatcgtgcatctcttggtcggggtcctcttcgtcgaattggtcctcggcttcgtcctccagttcctcgtcctcaatatcggagtcatcaaattgcccttcaatagcctgatcgaaggaatcgtcgaagtcgaggggcccgtcgttcccaagctcttgcatgttgtgcccgcgcgggtcgaaatcatcgtcgaagtcgtcgtcatccatcatttgtggtgggagttgctctacccgtgctcttggtcttccaaatattgtaaaagggtttattggtgccgctggatgtcccgccacggcaactgggtcgggtgtgagatcatttagaccggtggaggggggttggtgtcgatgggttgggtttgtgggagtgtgacgcgtgggcggggtctggaattgggcccggaggtttcctggggcattgtcttggttgggtcttgtgtcgcgcggatttggttgtcggcgcaagtgaggcatggttgttccataagttttggagttgatgtttacgcgcagatcgaggggagctccatttccgtttacggttagcgccatttggaaggcatggggtaaacaacagactatttgattcaaatatgaatcctactaaaagaggaaagcatgtagaatgcttttccgtgccatcgtcaaccactggaattatatcgtttatcgtgtcaatgaatgcctttatttctagtttgcagtttgacctgtgctatctattgtccatgcagtttgcgatatataaccacatgtatgcagactatctagctaactccccctttgctgatagctagtgccttcacactcttatgagaaagtatgggccttcatagcgatatattgtctagtgggcctagtaggttcaaattcaaatcgcaagactataaagggcttcctaaaagctcactgaaaccccatgagacattataggacaagctgtgagctgtttgatttgctagcaatgcggcaaaatgttctttatctttcttctaattaaggtttgcaaggtcctcttctgtgtatctattagttacaacaccaaacagatcgtcaatctcggaatccagacggccttcgcgaacaatgtttcgaaagccatccaaataaagcagccgcagactcccagactggacagcttccaagtctgcaaggatgagatacgtcctcgtggaaagtctgtgtaatctcatcgcaaggctctcaataatggcatctcgtccctcgcgccattctccaggggtttgttttttcacttcagcaaattgggttcgaaccccaaacgtatatcatcacaacacaatacccctaccccgggccacggaagcgcggtatccatttatcttcaaccccaggagaaagcggagcagcgatttccgcaagaacgttgtatacgcagcgccagtccggcccaaagttaaagtgatccgcgttatcagggacagcccaccgggattccgcttcaaatgggtctatgtcgatccatgtattcatcaattcatcgtgctcaggccgctcgtctgcttcggggatagtatgtacgcagtgagacaggggacatactatctgcgcgctatcgaagggcatcaacacggtaaggccgaagaacttagaatagtgccgatttcctcggccgtaggcgtatgagacggatcggcatgattctcccaatctcctccataggaataaagttcaggtcgagaaacccggtgactagtttgctcgctattgatcgagggtttcggtcgagagtaattccatttacgtcaagtgcaaggaccagtcatgtcctccatgatgaatatcggccgagagcctgtagacaaggggtgacaggtcagtgttaacggggcaatgctcatgtggctgatgttattctgaggctgtgcttttacagtggcgataccgaagtaaataaatcagtgccagtagtgattttcgactatgtcaacagcaattactccgtatctatacctttgataaggtctatttagtaaaggtactctttcatatgggtagcagaccctcatatcgcgaggtctgtaaaattcgtaaaaatatgtaaagactgatttagtctcaatacaataatagaccgcatactccgtagtccggatgtccttgaccgccaactagagattgacacggatgataaaccgaatagtgattcaacggtagtatcctagtgcgacaacatggtatccattatagctcgcgtcgcaggtgccaagttccaatccaacacgttcatgacatcggtgtgtagcatttcgtagtaaaccgggatatctagcagcagcactcgcagcactcgaagcaggcgagaccagcgcagctattgtgagaatgtcagccccatttcttattctggttgagtacggctctctaggaagcttgtaagacttacattccacagcagatatcaccaccttcaccgccaccgcggagttccatcttcatggactcggggttctaagggctgattagtggtgattccagcgaataataaccgaaatacatacaggttgctgggagacgacgttggtaggagacatggcctgggtgttggagggctgttccatggccatagaggccgcattccaggtaggctcctgctcctgggtgggcttggactcgttggaagacttgaaccagccgaacatcttggatgattttgagaaaaggggatatggagaggagattcaggaggggaaggggaagataaaggggaaaggcaaataagccggggtcagccgtgtttctactgaaattaaagtcctgcctccgcgctaagaataaactgaaaactctttttccaggacaggcaaccggattatgggccggtggggtagtcgggctgaggtcggcagaagaggattaccggcttatgcgctggcttagaggctatgcttagcacagctgaaatggaaagcgaggtgacttgttcatgtgttggtttctaatttaaaatgccggtaagtaacataaaaactatataggaaacattggaagtccgtgtgaaatcggacctcgaggatggagatacaccaagcttttggtcaagctttacgacagcttggcgcatttcctttcagccctattgttctatgacgtcttcgcgttggtatggggtatctttaatatcgaattataaacatgttaatggcctcgatttataattataagtctgcatgtctactaaagtgaaattactaaattcagaaaggcagcggcgcaagcacaaacctaataactgaaaccaaataaacagtcacgctctttcgacatcacatcaactatccatgccaatattccggtgcatcttgttattctatacggagtatacaaatcaacaaaatatcaagcagacagattcttctcataatgatcagctaggccaaatgatgggcccccgagcaggatattcagctcggcctagtccaaataacgtacacgcggacagtaattgatcggcctggaaacagccagtaaagatcatagtcccaaggctggataacgttgcactcctcacccgctccatggataaagcgttccatcgtgtaatctcattgcagacaacgaacagggtgatgcccagtttgcgacggaccatggtgttcacttcttgagagattatctgggggctaccgtcacctgtgaaacacatccttcgtcagcgctaagcacccttggacggtgtcccgtcttcgcatacggtaagggctgttctcaccgccacgccgacagtaatgtgtgaaaggtaaaagttccaacatcttcggatattatgtcattttcttcaagccagaaagacatcaactatcgctgtcaattccagtcatgggttaatggttaagaaactactccgtacgtactcgggttgtaataataaatgtggaatgtattggtctccgtaatgaaactctgagtgaacgcattacccataagttggtcttatggtctagcggtcatgactgtggattttgacatcttgtttggaatcttccaccgaccccggttcgaacccgggtaagaccttttattcttttattttttttcatcacaaatgatccattctagcgtctattgtcgcacttgtctatttcaaatttagtaactttgcttcttaactatacagaatagaccttgtgaaacttatagctacaatccctgtagagttgttactttttgcacttgagcgaacattccccgtttattcttctacactcgctcatatatttcacgcctaaattagctgtatgaatctgtgtgtgcagatcatgggtttgcggaaagcacacacaaaacgctgatcgcttgcttactcttccacagaattagaaagagcgagcgacgggttaacagaacaggaaggaacgaccatcctacactaatattttctttcttctgtcttgtgaatatatttcttattaactagtcacctgacaaccaattggtcttatggtctagtggttatgactgtggattttgatatcgaatttcaaactttccatcgaccccggttcgagcccgggtaagaccttttctattttatttttttgagggtgctagtaatttgatgcctgaggtggaaggcagaataaggcgggaatctaatcctctataactagttaaagagaactgtaaataattcaatccagcgaacttatcgatagttacaatattttcggtgacatgggaagcattattttccactgtactactaattgttgtcaaggacgttgacctagaactctgaacattggtggtgatccaaggagactaacatatagtaaaacaactccggtcttcttcctatattgagggccattcgagaagaaagacgctagaggcattgtgagttacacgtgtagtgtggactgcggggctaagtatagggttgcatctatattttagtctataatttctcccgaaaatgcattagtatccaaaagataactattggtcccttcagctatcgtcgccctgctctatctttgactcgccaagtgccaaaaatgaccagtatgatggtgcgggcacgagtttctcttggggttttaatataggctacccaagatttcacgacactcaaaatccggtttgttggaagccgaggttcacagaatccttggttggagatgttgatcccccactgaggccaaagcgcggtgttagtgttacctcacttatgattggggatttatataactaaatatgtactggatatagtgcctaatgaattggagcagcctaggataaactccatgacacaatggagtgcatctaacccacgagacttgaaagatccccgcactatagaatgctcggccctagatcgtctcggccaacactgcaccgaagacaccacattggatactttataaagaggggttgtccttcgctctcgcaacccccaaccactacacaaatatacaaatatacaagatgtctatgaccattgaagactgcacccaagaccgggagggcttccctcgtccatttccggatacgcctaccaatgttttggagcagtttaaaatgaacggaaaggtggtggtcgtcacgggagctgccgatggacttggccatgcgatagcgcagggtatggccgaagccggcgctcatgttgccctgtggtataattcgtaggtttttcttcatccaatgtatgtaatcggttaaccatatcaacagaaatgacgtcgctatcgagaaagcccaggtcctagcaaaggaacatggtataaaggcatccgcctacaaggtcgatggtaggcgggcagttggagcttcatatctatagaaggcgacaaatgctaagctttatctgcagtttcggagtccaatcaagtatccgagacgattaccaaggtcgtggcagatttcggcaaaattgatgtgttcgttgccaatgcaggttagtttccgcgggttgatgtatggcagatagctgattgaaaaaggcatggcgatctccaagcctatcctggaacagactctagatgagtaccgaaagcagatgtccgtgaatggtatgaaattgttaattcggcgagataagaatgtggtattaaccaggattagttgacggcattgtgtattgtgctaaatatgctggcgaggtattcgcgcggcaaggtcgtggcaatctcatcattacctcgagtatgagtgcacacattgtcaacgtgcctactgatcagcctgtgtacaatgcgaccaaggcgtacgtcactcactttggaaaatcacttgcccgcgagtggcgggattttgcgcgggtcaacatcgtctcgccaggcttcttcgatacaaagatgggcgccggtccgttcgccctcaaggaggcataccgtatgtcgtcactaggaaggcaaggccacgtgaaagaaatcaaggcattgtatctgtacctcgccagtgatgcatcgacctttatgaccggaagcgatgtgcttattgacgggggatatgtcttgccatgagacgtttaaatcaaacgaatttgcaacgagaggatcaacacgagttggtggcaacatgcaatttacatgacggtactacgtactgatccaataataaagaattggcaatgaactattcaacgtcgggcacactccgggcacactccttgtgcccgaaggcgttttgccccgctatctattttcaggtaccgtttcaataccttttgtttgatcgcaagagcataccgagcgcagctatagcaaggtcaatctaaatcgaaccttatctcttcccgggtcagaggaacgtgctccagttcaagctgattccctaacttggaaaccaggcccggaattctgtcgggccccgggggatgggaccgtttatccgagccaacagccggtcatgtccgggagaacagtggagtagaaatgagtcaacgactcgcaatgaggcgccggggtgcagggtcagcaacggccgatcgtaccggattggcaacaggatcgaactttttccaatgccgtttcacaactggggctatcagacccgaggaatgtcttggcatggtcattggaataggcgtcaaaacacaggagaaaccggctagtcgatgccagggatgcagggtgtcgtcagctacacagcaatatcatataaaatgatataagccacctttttgaaacacggcagacgaagcggacaagacggagaaaacctgcttttggcttattggcatcatgtgattggctgggtagcggcccggttggagatctccttgatacgcacagagaaagcaagtatagagagaatataaaaggatcgaaaagaaaagaattagctgtagctgcggcgtatataggaagataatagagaaaaagaccgaatacagcagaatacagcaggctgtctccagaacatactagaatatactagaagtgacaataccgtattgaaatcggtttccccacgttctatcacggcccgaagtgacttcacattgcgatatcacctgcgatttctgcccctcctttcttcctctgcccagaccacccgttttctcttttgtattttctcttgtcatctttgttttgcttgattttctttcatagcgctgccatccggtgcagccaagtccaaaacggcataattacagcaattacaccggccattggtgtcggctcgaattcgttcccgatcgcccatcttcatctcgccatgactgatgaacgggatttttcctctgaggatgtcgcgcctagagccgacactctttctcccagagaccccacgacccctgcgttcccccggcagacctcgagccccgttgtcctcccctcccgcgaatctttcggagctggcctaacttcctcatccacacacctggggcaggtcaatgctgcgcgacggggtgttgggacacaacctaaatcgtcgatgagttcacaaggaaccggtggattaaatcaagatattatggcaaaaatgaaggcattttcgttatcccgtcaaggtgctccacagccacagactgctgcctcaacggggcagatccccatggctcaaggaggcggtgcaggcggcgcattttctggaggcatgtccccgatcgctactcgtccaaatcctcaaaattggtcctcttcctctgccgtctccgctcctggctctatgtcgcctcggcccggagggcttgcggcgaagcgcatgaagccgggtctcaagctatcggatgtcaccggtccatctaatactccaggtacagatcaaaagcagggggaacaaaatgccgagtctgcctttagcaaatactccgagttcatcgatacgaaggagggcactctcaacttcaaaaacaaagctattctacacggaggtggtgtcgaattttcgtcaggccacagcttcaagatttcattggatgaagtagatcgcttggaagagctgggcaagggtaattacggaacggtctacaaggttcgacactctcgcccgcatctacgaaagccaggccaggggttgggtggcattgttagccgtcctccaggcctcgccgaaccgactccagaatctgggtcaactcaactctccggagtggtcatggccatgaaggagattcgcttggaattggacgaagccaagtttgcacaaatcattatggagttggacattctacaccgctgtgtatctccattcatcatcgatttctacggagcctttttccaggaaggtgctgtctatatgtgtgttgagtacatggacggcggctcgatcgacaagctttacgagggcggtgttcccgagaacattctgcggaagatggctctgtcgaccatcatggggttgaaatcactgaaagaggaccataatatcattcaccgcgatgtgaagccaaccaacgtccttgtcaacagcaagggccaaatcaagatctgcgattttggtgtcagcggaaatctagtctctagtattgcgaagaccaatatcggctgtcagagttatatggcacctgaacgaatctcgggaggcggaatgcaacaatcgggagcgccgagcgccggtacatacagcgtgcaaagcgatgtctggagtttaggcttgtccgtcatcgaatgcgctatgggccgatacccatatccaccggaaacattcaacaacatcttcagccagttacacgtgagtactccgaaacagttttccaagttcaatattctaatcttgtcttttaggctatcgtccacggagatcccccaacactacccgagggcttctctgaacaagcacacgcattcgtcaaggcctgtctcgacaagaaccccaaaaaccgaccaacttacaacatgttactccgacacccttggctggcctctctcatggagccaccaaccgatgccccaccacctgagtccggctctggtgatgtctcttcatcggccatgacagaggacgaagaagtggctgagtgggtgaagaagcaaatgaaactcaaggaagatggcctgctaaagatttccgagaaaccagcacttcatgctgtcgcgctggatcaggtcggcacgggcccttccgagggtgttccactcgctccgtcgcaagatgactgagctttcggctatttcgaacattgcatcctccttttctccgggggcactttcacggcgcaggcgctgtttaccacacttgcatctctattgatttcaccaggctaatgcgccaatgctctggcgtttgggatccattggagcgtgggcagaccctcggcatggtcattacccgcgtgtgctttgagactatttggggaaatcatatacctggatctacgagcattttctgaactgcagtagagataatttgctgcgcccgcccttcatatgaccaggcgcgaagaaacacaatttcatacatgttacctgtcctgaatttccttctgtatctaccttgtaaacaatctggatttttggttttcgtagatgcagccactgtagtgtatcagtttttcaattgaaatttcattttgatgattcgctagtaatcagttcataagtacatatcgctaaaagccgtgttgaaaacagatcatatatatacatccccccgaggttcttattgctgttgaaattgaacaagaactctctcaatcggaatcccctcaagcctctccccaaacctcatccgcaatctccctcaccagactcaacttcttcttctgatcctcgagaagaagaggatacccactctcatgggtgctgaacccacactgaggactgatgcaaacccgcttgagcgcctcctccctagtctccccagacccttccgcaacaaaatcagcagcggagtaaacccgctccttcatagcctccttgtcctccaaatcgcgcaacttggtactgataattccgacgacaacattcttgttcttcggcaagaactttaacggctcaaagccaccagcccgctccgtatcatactccaagtagaaagtatcaacatccaagtcctcaaacaacttcttcgcaatgatgtcatacgacccctcggagaagtgccgtccaccaataaaattgccgcgacacagatgaatccccgtatgcatatcagccggcagcccagcaagcgaatcattgtacagcttaatataagcatccaacagatcctccaccgacccctcattatctgcatccgccgcccacccctcccggaacgcagtagagcagaaatacgccatcccaggatcgtcgaactgcacgttccgcaagccggccgcgtacagcgacgccagctcggcgcgatacaccttcgcgacgtcggcgaagtactcggcgtcgttggcgtaggcgtcggccgcgtacgcgcgcccttgcttgtaccgcatgtggaaccacgccggcgtgatcatcgtcagcttgatgttgggccattcgctctgcgggagcgacgcctgcacgagacgcagctcgtggaggttggactgcgaggccgagacgctgtgtgagagcttgctgccggcgattacggagtcgcccggcattactttgcggtctttttcgatcaggctgaccacgtctgggtggtagagtctgaacattgaggattcggcgtcttggagtcggattgttcctggtttttttgttagtgtgtttttctttgcttgggggaatatcgatagatagatagatagatatataggatagttaggtatagcccggatattagtatactacgtaccctcgaactcatcccacatcaacccccagaatcgggtgcggttgtactcgccagacgtcacggccttgaacccgagctcttgctgcatcttgacgacatcgcggacggcttcttgctcgatggcggggagtccggcggcttcggcggagactccggtgttggcgatcttctcgcgcgcctcaagtaggttagctgggcgcaggagtgagcccatctgctcggcccggaagggtggggcgcttttaagctcgttcgccatgttttttgtaggaaaagctacgcttgcaaatccaggagagttgtttggtataggattattccagggaaattttagttttagttttcaggggacatccctctcttctctatgtgggggatctttttctgcggggctgctaaaatgtggtgctaatggggcttctagtagagcggctatctgagcaccacattttagcaccacacaataagaaagatcccccacatggagaggataggaatatcccccaaaactaaaatttctaagataattatataccaaacagctcttcccgggtagcttaacgaccagaaggtcgcagttccccgagggagacagctctgaaggccatgatgtagaggatatatgcgcgggcgtacattctcccgctcggccaaaagaccattatctctcgctctgacatacccaggaccaatatatatagtagcgcacaagctattggtgacagcagtctttatataccgtagcgctcttcccgaataagagcaaaactataactgattcctagtcttcggcaaagcccgagtcgggcccagcccgtggcccgacccgtacgggcttcgggttgggtcgggcgtagagcctcaagactttgggttcgtgcccttagctactcccacttctgtatccgtggtcctatcgacaatctgtggctagagtactcacaagtcactagtacgctgaaccaaatgctggtctcagaatctggtggtcctgcaaacgtccacctccagtggggagtaatccatgatgatattcggacagagagctgtacctcatggggggtttctgtgaaagccactcagcccatcatgccgtttgaccctctcgttcgtatggctgctcagcaagagcaatatgtgttgcatccatcctctgagagtgcaaagagggctttctcgaactttgcgacgctgactgacaagacgttgaaccatctttgttgctatttataatccaaccctggctatacggtaattaggtaacgcatgacctcggagcaacaagcaagggaaaccagccagctataatgtgtatgcatagtcactttctcaccctacttgaagccagatatatgcatcacctttgatatttgaatgtatgacgcgcttctatactccactatgcctcgattgaataacaaaagagatatagttgtaaatgaagcagtgatctgtgactctaacagagccttggtagtgagtaacctctcttgtgagattgtttggacagcaaaagcggatttttgcggtagtcattcgcctgaatgaatacccccctcttgtaccaggaacatttgaatcacctccaggatcacgctgttcgttcctgggagctgctagccgtctaggagcgcccctaggggtagcctaaccgtagaagtgtagggctgtagcgaaaaaatgtgctgaaagaggaatgaaagagtcgaatatggtctaaatactcgttgctaactaggtgtgaactgctgatgtcagccgttagcttgttggcactggaatggatagaaaacaaagtaggacatttgttcacagggccaggatcggtaacaggaatggctggctcggacatagccacctttccataagtatggggtcttcaagtcatcgtgtactccgtgtaattcggtgacggtaaattacgcaaaggagtttagtatgtttacccccgtgatctgagtagtgtattccctacagaagttaaggaagaggctttctggctagccctttaagtcccgactgggacatcgaagaagtgatctcgcggatatcttgagacacaaattcttcgacttcgtcgttcaaccgcccccaaagatagaacttattgccagacaggaaaattgtgtgccatccgtaatcatcctccataaccggctgtcctggttggagaccatagtctcgagcaattacttgaccttcggagtcggcgcctatccactcttcctgataaagaggatttgatgggttcgaggtccagccagggggatcagtaaactggcaatccttagcgacgtgaccaaaaacaagagggagttagcctatacttactggtggcagagcggaggtcttcgtaggtgacttgacaggcgagaccgccacagaaggtggagtagagatcctggatggaggcattatcgcaacagtggacatggtttcaggagccggcttgtcaggattgtcagttggtgaagggattaagggcaggtctgatgtaattatgtagtttctgccaatccggaccgccaccatgtcaatacaactctctcctttctgcttcctgagcctacaacctgtagaagagagggaagcgatacgaaggggcatggccacctgagcatgctgaggtaacgactacgcgactaccttcactacgccatgataggaaggcggaggtactggcggtgaaggggggtggtcacggatctttgcggtgccactgtgcattgtatcttaggcatcaacttcactaatcaccatctcggtgctcttatcgccgttaaattcaattgattaattaacctatcgagataaaataccctaattgtattattcagctaggtaccctctttcatatatcccccttagggccgtacgaggccatatcgattctccatgtttttgagataaccaatcaataaagcttcatatattcaaacagctgctatataggcggtttcaaaaatagaaagatacgacttactacttaaatgcggcctcttcgagggtagttccttctaggaggaaagagcaaggtagcaacattaggcatactataccttcctagttgcaatgttgtttcatgttacatgccattgccggttcctttcggaagaaaagagtacaatcgattcaaggaagggaaagggaaaatgaaaacagtctacgatctcgactgggttttgtgctcttcctggcgacctcgccacaaaccatgcgaaccccgacctcgcttacggtttaggaaggaacgactcgattggcaagtgcgaggtcgaggttccaggttgggcaggtgcgcagtcggcatcagtcggcagatcgtcacatttcaaacaattcaactcccctaccagcttctcaatgagaattctaagcaaatacaccacattctgctcatgatcatggcatcggcacctgcgtcagaacaagtcctgaatgcttttaacgagattcttaacttgacaagggcttacacttatgatcgccagcaggcaagtgaatcactaacagctgcttaaattgcatgtttcaatccatcgagatcttctaaattcctgctagaccccatttggcacgatgcagtcccctattggggtctcttcgatatgctcggccttttcgtctccatcgttggagttgcgccgagcggggctataaaacgaaatttctacctcccactaacagcaatgtatgctaattggtgtaatactcttgcggcacctgttccaacgatgtataattgcacatggatagcgtatgggcccggtaaaggtacattctttcttggggcctccttaaaaggtgtccgttccccccacagcattactgggccgtggaatgaagtaatccaggaagggcgatttgccctgatcaatgatgctgccatgattgagagtggcaacacaatgaagaactgtcctgagcaaagagagaatgatacgttcattcgtttcggaaattgtgccgagacatatccattcgttcatctgttccagtaagtcaatattccagtctttaacgatactctacgacgcgaaaatttgatctaactactagataggcacagtggaaaccccgctgcagttcacggaattgcgcttcaacgtcaaggagttcttcccgcaaattacgaggatagcttgtccggcagtgtttggcaaaatgtacgaccactctgtgctaattgtcgagagctgactcagatgcggcgtggatgtgtcgccaattttgatccattggctgatgcgagcggcgcgccaccttgaccattatgttcctaagtttaagtaactaactaacggaggggagaggttaagtgacggtgtattgggacgcttaatcggaaacgacaaagctgaacggatccagtaaatcacaggtgagtctttctagggtagactgttaagttaaataagtaaatacgtaggtttggtctttctagttattactatctggtcgaccgcagaatttattcccgggtatctcaaagaccagaaggtcgcagttcctcgagggagatagctctgaaggccatgatgtaaaggatatgcctaggcgcatattcccccgctcggccaaaagatcatgatatcagagcgagagctctgacatgcccagggccaatatatatagcagcgcataagctactcgtgacagtaatatttatataccgtagcgctcttcccgaataagaggtaaaactataagctaataactgattcctaggtagtcgtcggcaaagcccgggcccaagatctcggcccgtggcccgacccgcaacccaaatggcctcatgaacgggccaaaaccaacaccttgcttggcgagaacgaaatttcagattggcgactcggagccgaagcttactatcgtggttgcctatcatgttttagcccccaatcatttaagatcctttctatgccgttatggcccgaattccattcactgctgcagctctctggcttaataaatccatatttctttgtaatatcaggtggttttggacaccattacatattcagtgttgactgtggcagtactagtagaagagaaaagagtaataggaaaagaaagaaccctattgtctaagataagtgtgtaaaagtgctgctgagtactaaataactagttaactatttaattgataatcttgtagcggtgagagagatatgtagaaggttagattcctacaaacgatcgagatctagctaaatagctaggtgaagcctggcaaaccaggcaacggcatgtgatcggcacatggccaccacaacagataataaccataactaagcattagataaagtgggtaactagccgcctcaagactttgggttcgtgcccttagctgcccccatcgacagcattctctcactctccacagccctttcaatatcacatccatatgctcgctcttcaacatattctatagcctacattcaattataacgtgtagtatttgattttcaattctacctatatatgcataagtgggttatccggaatatgcatgccgggtcctccggatcctgtacaacagtctaccctacaaagattcacccacaaccacctccacttatattttctagctcatacatagcgtggtatacaattcggtatctctgcagattcaaaatagtatatatccaagcgatggcgttctcaaccctcaattttatatagtagggcccccgagcatcactaactgcctaacatctatctggcatattataaattgacaaacgcaatggttgtagaatatagaagagagggattagacgaactcgatataatacaaaatacaagcttaatactagagatcaagattaatgggaatatgggcagagtgtgggtgaatctttctagggtagactgttgtagcgggaatccttgaatccttcctgccacctcacagcaaccatctcgatcgagattagctggacggctataagttcaggaagtgatcccctcctctcttcttttcgttgatcacttcccagcttctctcctttcctcttttctttcctaccggtcagcttctctcctttcacggaaacaaagcaaagaaaaccaccgaacccaaacgacatcatgagtgactccaatgtctgtggcaagtgtggcgcgaggcgccgtggcgaaagcaaagattttcaattctttgtcgccaaatcagtcatcgggttcatcactatgactgcatgcttcgtgctgatgagactgttcttcctaggtgctcttacgcagcctatgagtaatcagtctgatatttcgttacccgccatgggtaatcatagcgatcagctgagcggtgttgatttcacactctacgcagtcgacgcctcgatgaacgaacaggacgctatacagagctattacagtgccttcgtcaatgaaaccccacctgtccgaaaggagctggtacgactgtaactaccctggtggtggcatcggacttgcttgctgcggcacggcgcatgggattggcaactttgtctcttcagtcggctccggctcagcttcaggatacatcgttactctactcaaggaaatcaattctgccagcaggctcgatgagaagccgcgttctgcgtacatcacgcaggacagcagcaacctatgtgtgtcgtgggcgacctatgcgacgagcaagatgaccagcgctgaagagacagaaatatcaaccttctctacggagtgcgggtcaaaaggctacttttgatagccaatcctcacgacagattcctctctgcctagttcctcttgtccaagtcactcaatacatgtttcgagttttagccacaatgaaaatcgtctcaacgatgattgatctggagcgctttgaaaaaaatgcgaaaattccacacctctctacttttacagatttatcccgttgctcggcgaataccagaacatggcgccatcaaatgtgatgtggctaggttaaggaaccaataaatttattggactagcataatggaaacaagaaagcatttcatctcaagacccaatcggcattatacaaaattcctgcaatgaacaaacacataccaatgagatgaattgaaaaactgaagcaccacaggccagctcaattccaagatgaaattagccaacacaagctgtaaaatcaaagaaacttgccaataaaagaaaaaatcattatcacaatcccctcaccttacttactttttctcccctaatcctagactaccgaacaacttgtcaagtcccaatccgccaagaaggccattcaacaaaccacccagcccgagaccaccgagcagttttccgaccaaccccagaacaccgctcagcagcaagcccacagcggcaatgatttggaaaagtggctcggaaaggagggcccagagcggattcagctttttcttggcgtgaggcatgtcagctatgcgtttgcggccgttctcgatcgttttggtgactgtctcggtcagctccttgagtaggtcggcgagctggtactcttccggggtagcatcacgcgaggcagcgcgcgccttagcggtggccgcgatgcggccatcggggtcgagggcacggatagagccattacattcttggaggatacggccaccttcttccagaagaggtttaacggcttggacgagcttctcttcgtcgagctcttccttaggtgtacgctcggccttttcgatttgctgtagaattgttactactaagaaagaaatataagggggaatatgaacttgcctcagtgatctgttggcaaacaggcttaactcggtcgagggtctgactgagaatatagatcatcttctcagctatctggcggtcctgctcggctttagcctgagcctctgcctcttccgaggtaagatcctcttcttcaggctcaggttccggaatattctccagtaaggtacactcgccaatattgttgccatcgttgtcaacgacatagccgttatcgttaacggttttaccaaccagtgttgccagattaccggaagtcagtttaccaataaggttaccatccgtatcgcgtacctcaccctccttagtgatcttgcggccagacatagggttgatatcgcgctgcttctcttccggctcccagcgttcggccttaccgatagtatttccattcttatcaataacatcgccgtcctcatcgaccttacggccgaaaagaaactttgcatcgccttcgataaggcggccgataattcgaccttcgtccacaactataccgtccttaccgacctcagctttatcaaagccgtagaactgcccctccttctcttcctgctcctcatcgggtatcagccctgcccggccaactaccttaccgttatcattccagatttgaccctggccgtcgaccttacagccagcgagacgttcgccttcaatgacccgcccaaagacaacacccgtagctggatccacaatgttcccctgcttattcacaactttgtcctcaagaatagaaaggtcctcttcagcggggggttcttcctcgggtggctcataaggctcgccacggcccctgacattgccatatttatctgtaatctccccatcttcgtcgaccatttggccacgcaattttttggcaaccccctcggtaagtcggcctacaatagagccgttctcgtcctcgataaacccgtcctcagtaacaaccaggctctcgaagccggcgaacgggccatcgggaatatcttcgcgctcgtcgtcaggaataagctcagcgcgaccgacaatatttttgccttcataaatctcgccgttctcgaatatcctttttcccgccagctccttagggcagccctcaataatgcgaccgatcggaaagccctccggcccgatcacatacccggccttattgcagctcagcccttccatactggaaaggtcaataggctctacctgaggcgattcaggctcctcccaccgttctgcacgcgcgacgacgttgccatactggtcgagtatttcaccgtcctcgtccactgctctgttgaccagctttttcgcgtcgccttcaatgactcggccgaccctcgtctggttctcgtcttcgacccacccgtcctggccgacgaccaggccatctaggcccgcgaatagccctccctcttcatcatcgtagacgggtattggctgggccttgccgatcatattgccgcggttgtcccaaaactggcccgaggcgtcaagctcggcgccaagcttcgagagcttcttaggatcaccttcaattatttcgccaacaggcttgccggtagtttcatccatgatgtagccgcgcttgttgcacttcagaccctcaagagactcgattgacggtattcttttgttactctcctcggtgtcgtcgtgagcagtctgttgctgttgctgttgctgctgctgctcctccacggggaacaactccactcggcctatggcgtcgccttcatcatcgacgatctctccctcgccattgacggtatacccgacgagatcctccggatctccctcgacaatcttgcccactgccaggccagaagaattctcaatcacgccaccctcggagacaggcagcccatcgagttcatccagggtggttaccacgtccttggcctggtccagctccgagttttcctccccagaaaactccgtagattgatcaaccgtctcatccaatatatcaacacggccgatcaaatcgccatcctcgtttagaatctcgccattgtccccgacagtctggccgaccaagtcttccgagtctccctccaccacttttcccattgggttgccgttctgatcgcagatttggccacccttggcgacctcgagacccttaagcgtagaagaatcaggcgacacggtgctcgagtcagtgttctcaccctctcgcgctatatcctccacttgacccgattggctccgaaccttctcgggccgttcggacacggcgcgcccgagtggggccgcagcgccagaagcttgagaaccatcgtccttgggtggggagataggacggcgctgctcgggtgcaccaggagattcctttgtagactttgagaaaggggttgcaggcacggctgtttcttccctgtcatccgagacgggctcggattgtttggtttggagcttgcgcggacccgtttttttcttggaattgaggctcattttgacccgacgtaagggaggatctgaagaccgtttgattttcggttgtactcagtatttactttccaccaaaataggcagatgagaattgagctttaggaatatgcgatagtaaagaattccaagtgattggggttgatcctttatggtgaggttttgctgtgataaactagtttttgcaatcgaaaggcccattgtcttgcatcatagtgacaccaaacaattgtcgccaaagagttttcacctaagctgtgcatgtcatataacaagcgtaaaccgtccgatgtagccaaaatccactttatcacggcctggtttgaatccaacacgccgaaccaagcaggctatccggcgcattgaagtcgagactttgtttaaccaaggctctagatttctttttgaattgaacatcttggaagtaatacaatgacgaagttggtgaatattctagccaaactcaagcaactaagcggcatttcattgaactgcagagccccggtgacgtcggcggcaacgataactcatctgacactaccatcaccccgatgcagccattcgttgggagttcgctcttccttgacctaaatcctcaagtgaaatttggatgggcagcaaaatcttaatgtagcgtgacctggtcgtttcgattacagaatctatggtcatggtcgccaactttccgaagccctcggcctacagaatggctccctggtgatgggcagacatatttctccggagcaaagaatatctcagaaagaggaagaggaataatatcaatattctggtctctttttccacctcttacccccgaccagtcagcggcaccgaggggtagccaatcccctggcttctactttagagcaatacgttacgatttatttgacgactggttaaaggtgcgcttgttgacgctgaatattgaagattggcgtgttagccacgaaccgctttcatcggttcgatgagctctgattatttccggttattacttgttccaatactgctcattggtagtctaaagactatctataccgtttcattggatactgactgcttggtcacattctaaaatacaaactgcaatcaaccaaggatcgatatattacaccttccagcgacaaagccacggctcaatccacattgcctaataaaagatactggcacctaaaaggcgatgatgaggaagaaagctgcgctgcctgcttgctgtttggctgacgtagttgggccgacagattggatcaagatgcctattgaatgacaatgagacaaaggctttatggccgtaaggcctaccacccagttgtcacaatacataatgctcgatgctgtgagagtcgtgtgcttatatgttctcttcgcaacactcatgtgaattccaaggcaaatgagagcgaggaacgaatttgacaagattgatgcaaaagtccacagccgtctcagctggagcccggagcctagttactagtgccagtcagtaaaaatgtcacaaaacattgaattgtcaaaatgattctctgggtccccaaatgctggtagaaaagaagggctcactgacagtaaacctatagtcaaatcacctttaatcttcgcctttagttgaatctcaatatccaaattgatatccaaacgaagacgcaactgctcgtcacgcccgccgtcatctttttcctctttttgctcttccttctgtccaccacccaaggctccgccgactgccttacctgtgctgtcagtcacgccgttcatggccttatcggccgtgttttgcaccaactcgcccgcttggtccacaccacccaggcccgaaagtgcgttgctgccactgcgcttctgcggttcttgctgtggctggcggtgacgccgggtgcgttggcgctgctgaggctgagcctggggttggccatctatgtcgctgcggtggattgactcgacatcggattccggacggtatgagcgagcgggatgggatcctcgtctgcggctatgtgtctgttcaagttcgggttcaggctcgggctcggccctttcttcttgctgttcctcttgtctatttcgttcttgttctggctcttgatacgagtcggagtcttgcttggacgtggacggcttcgtttcctgcttggtgggagcttttttgcctagcttgcgcggcgcacgcttaggcttgttaggagaggtcttcgattccgagctaagggtttgaggttgggtttgttccaggtcagtcattgtggagggaagggatgaagaagaaaataagaaagaggttgaactatgagctagtcggatggatacgatttgcgttaatagtacaaacgttagtgggagtaggtttagatgaagtatgatgcacatttgtaaaatatgtgctactcatttgcactgacattactccaaccgttctatattatcgaacagaccacgggcgagatgggacaattgggttgtccgacgtcaggggtggtggcgccgtatttatcgggagaggagttggtaccagacaggtttagccaagaaaagcattgagaaaccagctgccgatattacgaccggaaagcaaaaaaaaaaagcctgcgaaggtgtatagcggccagtggccgaatgcctaatgttgcagagctgatgccttaaatgcctgatttatgccgcctataactactgtgttttgtaaacggaaggcactattgtcttaggggctaatcctgataaggcagtgtacctcttggcactctatttccagtatgcatggcattaattatagtctcgctacctcttatagcagtggtatcgccccctcccgtagaaagggcacggaggcgaccgcgagcttattcttaggatacttcgctacgctagagctaggccgggggaagatagtggataaggttagaggaagagtaagaatactcgaattggagggagatggaggtttgtatagtaagaacaactttaagatcaggaaataaataaataaacaaatatatacggtcggaatatcttcaaactaccaagacttaggcgaacagagacttacatagtaggaatagctttattttagatgctctctgtcgttgtaatccaggtatttgccagtataaaatcaggcaaaatcaggcattcgaccgctggccgctatacaccttcgcagctcctcgtgtaacgaaccaaattacatggccatcccatacagcatgccatcattgccacttttcactcagtcttttcacgtctttgaccgttcggaaccttctcattactctgcctgccttcaaccaattttcttaagctcaggtagccttttctcccgatattcctaacttctttgcaaactccgaaacagattttacacctgccgaatcccaaaagatgggatcgcttcctcaacttttcttggcacaggatgggaatcaaagcgagatccctatgccaatctcgggaaaatgaccactagcggaatttcggatctcgtcccaatggtctgcctaatagtgctagtgccagagccagaaaagcctgctagccgattatcgagcagccgattttgatattgatgataaaatatgcgtcaaatcaggaagccaacaaagtacaaatagttgggcgaaatgaggatacatgggtttacaaggccctagttaatactagcctgattgatgggagacgcaaatccagaggtaattatatcaatcgtatgactataaagacaacagtattatccatcaattttagaatccaaaaaaccaaatccacaaagttgtaagccgtccactaatagcatcaaaaataacagtctccttcactaggcgttgttgagaccaagtgggttgtcctcatcctgcttctgtcccccaacaccctggacggtaccctgcacagcctgtccagcatcctcggttgtatggccgatgccacctgtcgcaccggaggcagtatgcccgaggccttcagtggctccgccggcggtctttcccaggtcgtcgaccgtgctacccaaggtgtcggtcacgccgccaactgtcttgccgacggtatcggtcacaccgccgagggggccttctaaccaaccatagagtcagcgaatactgatattagctatatggtgttgaatttggacatactgctctcgtcagacatatcggcgattggtaggtttcgtatagattcaagaaatatgagtttgaaatgtacaggttggaaggctattgagactaggctctccgcctttatatatcggttccatccacaacaaatagataaaagccgggtttatgacacatggtatggttgggtgcaaccccaagcagcctgaaattaccaaagtatatagtgcccacaccaataacaagctaacaagtggttatagggagtcccatttgtcgtttagtacatgacagccattcgatgtagaccggttattgaaccgtgttttatccgggtctctaccagccatcgaccctactgctggtggcgctgagcaaacgattattggaactctctggttgcccttgtaattgtgtcttcgtcttgcacgccgatcagatcaaaaacaggaaaatcttcgccacaaaatatttccggtttgtgaaattcttaaatagatagggatattgataaataatcaagtatggctctatgaaaagacgaaagcagtattggatgaagggattgcttgtgacgacgtcaaattttcgttgtgcaggaattggtaatggagccaggatggttgttcatgccctgttgtcaaaaaaacaagatcaactcctattcaattttgagcagacatatttgacgggtaagaggggagggaggaggtgaggtgctttaagagcaggaaacttacaagagagacagggttatgtcaccgtgaatactggccttcagttctatctcaatatccaggtccaattccagcctcagcttcaaacccttctcatctagaatcgatttatccccctcatgggaaatctccatgccaccgccaggtttctcttttgagacttggttggtaaatggctgcatggcttggccatcgtcatcagaatagtcgtcatcgtactcatcgtactcttctgggctgttttcatccccatccatgtattcgtcgtctttctgttgttgaagaggacgcctccgttgctgcagcacttgcatattcttagtctgtggcgcttcatcctcatattcctcattggtgtagctgtcggagctgtagtagtcttcatcatcagcgtcgtcgtcctgtacggggagcttcttttgctgctctttgggcttttcactggtggccataatggatgcgatggctttgcattcgattatagagagaggaaacgtgtatatgcgaaagcagataggaaatcaaatcttgaacctgaaaaagaaaaatcaagatgtgatatgcaataatcgcacgtagggaaaacaggaggacatatcgtcgatatcaagtctatgcggtgtgcaatgacgttgccggctgtcttctactttgctccaggcccaaattactctaatgaggactttagatgtgccagctgcgctgtttatcattacattcgtggcattgcgtgttgagtatccctggatctactgaatccaggcaattgtcggttagaatacccctttcgtttggtcatccaggacgggactaaattgtactgtgtgatgggtcaactccatgcaattcctccgtgcgtttctgcctatacctttttggtcgggctggtcgctttgtatgtttgatactgactcaaccgaagaaacacggcaataccgccctctacgtcgggggcggccaaaaatgtcccatctcgcctggctatgacggcgtcctgcctggactatgcgatagaaaaagcctaaatctgcggatgacattgctaatcggtttgttattggttcccgtagacgtcatattatggctcttggtaatgacatgctgccgattagttaactttagccgacatgttaaattatgtagagttggtcattgtttctattccatgatttcgactcaaatttgtgattcaatgagcgtcggtattgcagccaaacgctagttgaacctctgatttcgatcaccctgctcgaaataactcccatacattttcctaactacatgctcatattcttctttcggtatatcagctggattgtcccctttgaaaacaatgcaaacttctatctatcaaacaatcttgctgatgcaaacaagcaaatagatggcgagtggatcgtaacagcgcgcgccacagccatttggtggggttctcaagcctaatggctaatgcaaagtgaagaattgtgcaatcgagtacctagataagggctgtaagacaaatggtacaaaatggctgtggcgagataatatagacctggtgaccccgagcttcttctacctgcattcctccaaaagtcgatattgccagcctaattcactctctttaaccctttccattcttccgctctggattagacccctcatattcgacaatatcgttttcacgctttcccacagaggctcacccgccatttctttgcaaaactccaaagttgattctgataaagtcagctaagtggtttcacccaaattggacagaggacatatgacaggagcgcaagtcggaataatatggcagtgataatgtgtcggcacaagagatgctatactcctcttcctctagccttcacggcagtgatgactggtttcgacttcacgggacaaaagttggacattgatcttgtctcgttacttttctagatttaataagtgtcctaaaccttctttggggcaactatctactcactgtttatgtagttcctacgattatagatttcagttttgtctcgattagccagagcatccactaatgctctaataggacgcagcttttatgatcctggatgatttgattcaggttgtattctcttcgctcagaagtgctgggttttcacactgtagccaaaccttaggctgtctgcactcaggtgcaagctgaatactaccggcattcaagcacctgtatattaatgatgagcttgcggtctcgctttatcggaaatctgatatgctataagagcttagagatcttaggtacttacctaagaaaaatccagatattatagttgcgtcggacgatcgactcccgttggcatctctaggtcgtggccgaggactcttcttgtcgtattcttataccgtgagactcccttatgctgtaaaatattgtgaggccctgattctattgctttgccgtgactacgatttttcttacaagacttactggttggctattctaagctatatgttagattttatcgacggtacggatatcttgaatgaaaacaagctgcaagaaggctatagaaagttttaccgtgccctcaaactagaagatcctaagatgtggtcaatactggatgagctccgactacgcttgaatgaagagcgtcgcctcccagtgatcaaagatttataaaaccgggttaatatgatctatacaactctatgtctcatactgccaaacaagaaaataataaataaaaagggatcacaggtaggccccccatatatattctgcattcgcgcgcagtgcagattgaacaccgaccgtcacaaacaacacgtgatgtcccaatagcgtagtatcaaaagcgtcctgcatagcgacagccaaaaagcctcacatcctatctccataacgaaggacaggtaaaagaaaaaaaaaataggtagcttctctttgattgagcgtgtcatccttagtgcaggggccatgctaatcttctctgtatattttcatttgaccatatgccccgaagggcgaaaagacttccttaaagttcaatataacccgcgttcgggggcagaattgtaccgcctaccggttaggtaaggcacgtgggcggtcatatacattgttatacatgcccttgctgtcggcaggttgattggacgatgtttgttgtttgctgtttgctgttcattgctatgccgagagaagatcagagaattaccggcaccaagatgacaattgagcgtattgtcagtcgcgcatgacatcgatccgggaactctgtgcgaaacaagtcttcgaatttcttgatgatgtgtttgatctcggcatcttgtattggaacgacactagtctctctcggcatagtaattgagcagtaattcacttcagatgaaagagagtgcccatggaatcagatgaaaaggatatcatcttgtagcggggcagttttgtgtgggattactcagcactgcgctatgcctgtaggtgcggggtcatccaatgtcgaacttagggcttgggaagtatagaagtcacaatatctaacacagtccctgttaaggtcaagtccttgaggattggagagattaagatgatctcaacactacgactgaatttctggttaccaagaattaagatatacttcacttccttacagcctagcccaagaacaagattaatcatataattgcttcgcttcgctccgcaataaatatcggaatcttctagtattattcacatatatatcttctttttctcttcttgaaaagcattaccgcatggtcacaagctcctcggcgctagtagggtggatagcaacacagctatcgaagtcctgcttagtagcacccatcttgatagcaacaccgaagccctgcagcatctcaccgacgccaagaccaaggatgtgcagaccgacaaccttttcctggggaccggcgcaaatgatcttcatctcggtggggttcttggccttctcctctggggacaagccgacatcgtagaacatggcagtgaacttggtgtgataaaccttaatcttgtcgtcgccgtagcgaatgcgggcctcgggctcggtgagaccgacgcagccgacctcggggtgcgagaaaacgaccgtaggaatgttctcgtaggagatcttggagtgcttcagctcgacagggccgaagagacggctgccgagttggcgaccggcagcaatggcaactacagaacacagtcagtgcatttattcagacgaaaagtggaaataacgacttaccaggggtcaactcagcttgaccggtcacgtcaccgagagcgtagataccctcaacggaggtgttctggtactcgtcaaccaagacgtgattcccaagattcagcttgacaccagggatatccaagtttaggtcttcgatctcgggggcacggcccacagcccagaggagctcgttgacctcgatctcagagccatcgtggccaatgagcttgagcaggcgatccttgcccttgccatcccgaatgagttgcacctccttgaaaccaccgtggctgcggtgaagcttgacgccggcggcctcgtagcgatcagtcatagtcttctggatcatagggtcgaacttgcgcaagaaggtctcgccgcggatgaacatgtgggtctcaacatcaacagcgttcaggacaccagcaagctcaacggcgatgtagccagcaccgacaacggcgatcttagggggaagctcttccaactcgaagaatccgtcgcttgtgataccgtgctcggcgccaggtacggcggggacgctaggccggccaccggtagccaacaagatgtggggtgcggtgtaacgggcagtaccggagccgtcggccagcttgacctcgatagtgtgaggctcgacgaagccagcacggccttggaccaggtcgattccctcgcgaccccagttgccctcgtaggcgccgttcaaccgtttaatgacggcatcgcgggtgttcttaaagtgggtgtagttcatagaaacgttattggggatgtcgtagccatagttctttgcgatgtgcaacgtctcattgatggtcgcaaagttccatgtcatcttcttagggacacatctgaatgttgtcagaaaaaaaccgtcaatcgagtagaacggcattacaccttgtactcaccccacattgacacaggtaccgccagaccgcccgctttccacgatgagggttttcttgccataccaaccagctgcgcggcgagcgcttccactgccaccactaccaccgccgaggacgatgtagtcatactgatgtgtttcgacgggagccatattggatggttgttggttctcaggggcggatgacgaagaaaagtgtcgagagattgtagagagccgagagttcgtagcaattgggttcgcaggggtgaagcgagtagagttgatggtcgccagagttcgattggtcaaacgaccaggacgaatttgtccgacagaagatcgggtcagagatgaagaggctcgaaagctaattcgggaggattggatggagcgggagagcatggagagaggggaggaggggaagagggaacaattatatacaggcttaggtgagaggggtcggaaaagacgtggtgacgatatcggggttcgttaatgcgcattggttcttccgtcaccgcggtcgatttctcagcattgattacgtgatctgatctagatccgggacttgatacttttgggatctacactttgtttacacggttaatatgtaatattattgaatttgtggattgtaggtatgggtataggaaattcagcaaagagcgacagggagtgaccagcactccacaattaaagtcgatgcagcacacaaggaaataatatcgatcagaaaatttacaactcagagccagggttgaagcactggagtaagtcaagacttgatggaaaccaacaaaggccaatgaatgttgagagatttttcagatagaaaagggccccagccctatcaatccaaagagagtaacagtaacggggaacagggtatcaaaacgcgatgaatgtaaaaaaaagccatcgagcccatgcttatatctagactccatgtcacaacatgctagagtgacatggccagtctctggggcgagggatagacggtagttggggcgtgggaggtggaagagtgtgttcgaatatttgcgtggacagagatcgtgaaggtatcttctgatgacttgcagatcacgcaatccacacaatgtcatgacatgctaccctgctggtcacattttgcatgcgacagaggggcagtcttcaatgttaaaggcagtgtgaggatcggaggagttggactcgtatgttgtattgcgagacgaggaaacaaagtaagagtgtttcggtaggaggagaggcatccccgactcaaaatccaggaccacggggatcctttcaccttcgtctgggcgctgttgaagcagaacgctatcgcaagaggacggctagtgggtataggcgataacggcaaaagagatgaggcagaagcagagaggtatgtagacagagcgttccatatcggctggagttgaggagttgcgcttcatgtttttcagtatataatagcacagtgatgtggtagtgaattcggagatctgaaaaggagggggtccgggagtatgaagagtccggggagggggtggtgttatcttcttatctgcttatgtaaccgcgttgggccctcaacaaaacgtcacctgactcaacattggatgacatttggccagtcaacaaatagaaagggggtgtcctgatgcccacagtccactattaatctgctggacacgcaaccatatttgatgatgaagccccgtgggctgttactacttagttggctgacaagtgagaacatccaagtattccacgtggtactaagcctcggcaggtcctcgattataaagtggactgggaatttccaagtttgccctttccaaggttgtgcgataatgcatctgaatcgtctatatatagacggttttcgatctcctgagcaatatataggacagcctctcctcgtcttagtgtgtcctcatactccatacaccccttgacggtccccatttgccaagggtcggtcgcatgagctcataaagggcacctagccaacctcaacagcaacgatctacattactactttgcccctagccatacttacacatttaccaaagaacagcccctgtccagcgtaatccataacactccgaaacctccacattcacggagaatgaagaatgcaaggagatactaaaccacacctcctatccaccaatgaaagcaaccatgagcggccttcatacctggccaaacaaaacacaaaccaagaacgcgccttgccggccaatggagcaaggcatctggcctctcgagttctccttcgtagtcctgattaattagacagaatcttgccctagaatagtccgggtatacatgagccgatcttcccaaacacgttctcatcacctcaatatcacgccaacgatcttctaccagctaccatatcatcaccgtcataatgcgtgtttcagccctcgccttcgctgccattctgtccctggtctcggccaaacagatcaatatgcactgtaacttcgccgaggaccacaccggcatggttcagcagccctactgctgccgtgatttggtacctgcacggggaaactcgaaggcaaatgaggcattggactgtatgtataacaatctcgggatatttagtcactgggtttgtctaacggtctacttttctaggtgatcaactggaccagcctcaactgtgtgaagatcagtctcggccggcttgctgctatactattgtgagttttgttccagtcaagttggctttcggagtttgctaatctggtttcttctatttttctcagggcccgaagaagatctgtaccggccatgttatcttccaggatgcagaggatgtttagagtgagaagggtacgaaggcacagttgaatacaatcgctttatgacttggcatttgacgttttgacgtcaataatttctcgtgaatagacatcgaacatatatcacacttcgcttctggtgcttgaatgaaatgacggtgtactataacatggcgcagtctagtaggatgtttgacaaaactttgcctattgactaaaagactggacccaggagacagcagcataggtaaatcggtcaagccgtataattaattgcatgaatcaagtaatgctagaataacgagcgccaaactccacatcccccacgcccaaggtgctatacatagtcaaccttttataaatgcagccacatcaatcggaaattaccccaagcatctcctcggtgttcctgcgaaacagacgctccgctagccccggcttggtcgcacataactgcaagcaacattcggtgaatggactgatatcgacacgagagaatcgagtgtgtggccaatcagtggcatagatgacccgattaggtgcaacagataagaactcgcgtgccatagcctgaaggtcacgcatttcatggtctttgctgagtctatacggtgcagacaccttcacatacgtgttcccagcgcgaagcagagagattaaggacgagaacccttgaaggttatagggattgaaagctggaccatcatcgtccctcgaggcgagctcggggctgccaaaatggtcgatgcagatgcgcactcctagtcgtgggatgatcgcctcgaccatcgagatcatcttgaggggaagatatatctcgataatccagtcgtggagccgggcaagcttagcatgctgaagtaaggtctcttccagctcggtcttatccatcactttccctacagactgaaggttgattctcagtccacggactccaagagtatgccattcgtttaaagtctccaatttgacggtggcagggtcaaccacgacaacccctcggccgcgcgagggcccaagtcttcgcaatgcatctaataaacatgaattgtccgtgccatagactgacggttgcacaaagacgagattctcaacacctagtccggactcgaaggcaagagcttcgggtaacgtatgtgcggtgggtttatataccgccgttgaagaaataggaaaacgctcaggttccacaacatgcatatgactatcccaggactttggaggcagtctctgcttcagcgatatacttgcggacgagacatgtgttgaacgccgttgctctaaccgggtggaaaggacatcaatcaatatcgatggaggcccatggagtatattgggtttggcctgagcagtggtcagcatcctgaatagatcccaagcaaatagagagggtaggcagagtatagaaaaaagtcaaaaatcaagccctggggaaatactcacagaagagcaactccggcaaggcgatatcaccctaagaaaagacctaggaagaaccatgctagtttcaccgctcaacgtttgtggacgttgatctaagtgcctgcactgtaggggtgctgaaataaaaagcacccatcggataatatgtatggattacgacgtgtaggcctcgtacgacccacccccctagcacccacgcttgtggccagttgcaggggaaaatcgagctcggaagttgtccgtcaaggagacgctttcaatccgtaagcagccatctgggcctgttaaatgagctgagccgtcaagcggagccaagaaagtggataggtgcggcatgatccgacattgaaaaatggggtcacttggaagtaattgtaatgcgaaaaagcaatactcacggagtagagcaacatgtagttagacaatatgcagaatatcaattatcaggtaattagtgtcctaatccttgtaaaagaggggtgaaggacaaagtacggacgttggccgaagttctatttagctcggatgccgagctcccggtcttcctctcatgtccactcccagataacacttcatttgctccccggatttatcgaatacgcccccacagctcgcttatacaatttaagggcaatgcgatggacgttaaaatggtcgaccaatccctattacgccctggtgattgctgtcattgcctgcggcgggatcccgaaaggtatgaagacccttccctgcccccaccactagactggcttatcggacaatgatttgcgataatatactggtagacatttgctgattgcgcattatccccgacaggctatgacgaaggtggctatagcgccagtgtctccctcccctccttcaagtccgactacgacctcgctaaacacccggggttcgatgataccgagctagcaaatcgaaaagcgaacatctcctccttcaacgtgctaggtgcagcacttggtgcgctgttagtccttgatctcaatgatcgacttgggcgcttggtggcgtggcgcttagcatgcgtcgtgtgggcaacggggacattgatccaggtattcgcatccggtatatatggactgctcttgtttagtcgcatatggggcgggttgggcgcgggcgctctaacggtaactgcaccactatatttaaccgaaatagcccctgctaagacgagaggtctggtggtggggttatacatggtattcctactggcctttctggctatgggtaagctttgaccctctatacatcctacattgtatacatatccggctcccaatctgattcgctgcgctttcttgcaggattctttatcaactatggtgccagggtccatatggccaccacgagaactcaataccgcctcgttcaggctgttcctttaatccctgtcggtatcgcatatggtctgtcgtacctttgccctgagactcctcggtatcttgtctcgaaacagcttcatcagaaagggctggaggttctggcacggctacggggtagggatatcgatgatcccgaaatcacaaaggagttcgcaactattgatgcacgagagcgagagcgacagacagacttagcatatgtctcccattgggctatcttcaaggagacacagatgaatccgaattacagacagcgcttctggctgctaatgaccatgcaaactattgctcagtggaccggcgggaacggcatcacatactacgtaacgagcatattccaggtacgtcaatttcaacaagcaatcatcagctataccaggcaacaaaccgctaatatatacgaaacagtacgccggcctagaaggcgactcaacgtcccttgtctcctccggcgcatacgggatagtcaaactaatcttcacaatggccttcacatggggtctaatcgacctcatcggtcgacgccgctgcaccctcgccggactaagcctgcagctgtgcgcacacatctacatgggtatatacatgggcctgcgcccaggctcggaagacaacaaagccgcctccaacgcagctgtcgcctcggtcttcgtctacgccgtcggctggtctatcggcctatgcacggtgccttacctgtacggtacggaggtcttcccaacgcgtatccgcaacgtcagttacgcgattagcatggcgctgcactggttcttccagtttgccgttgtacgagtcaccccgaatatgttcgtctcgctgcacgtctggggtgcttatctcttctgggcacttatttgcttttctgggctcatcattcttggtgtttggatgcctgagacgaagggtgtgccaatcgagcggatgggggatttgtttgacgggccatggtatctacgctggcgggctaagccgagggagtgggatcttgcttcgccgactgatacgctggagaatgtttcatcgaaggacggttgtgtcgttaagtctgccggttcggccttgtgagggtctttttcgttatttccctggcatcccattgacatatatatgctctgttttgtatatcaagaaaaagttgcaagacttataatgcagtgcaatattgcctacaccgattgacactttggaatacattcaattatcctcattggctgctgacgtgatatatctatctcggattgatcttttggcagggtactatattgtgtgtgtatttgggaatcacgagaacaaaagtcgagtaatgctatacaagatcatagaagatcagccccagccctgatcaaagacaggcgtcatattcgtcgtgattggctgcgcatacgagaatgcctcatatacctcaggcgtaatttcgtaggacccggggtcattcatcgtcattccggcatttggcatcccgcccagcaagtgcataggcggcagctggggcatttcgcccatgttcgggatgtcgaaacctgatcctgggtgctgaaaggtattgtaggctcccatcacgggcgggttttcagggtcggtgttttggacttgcgtggctatcgatgcttgcgactggtggtgacgatggcctggagagacatggcgggattggttgctgcctgctgagggggattgactgtgctgagggtggtggggatgttgatgtggggattggtgatgttgggggtgttcttgtttagtctcaggaatgggagtggggattagttcgtggatgttgatttggagtttttggagctccagggagatgaggctgagcgctgttgtgataacggggttggcgactttgactctctcaagggcgaaaatgcagaacttgagtttgtctagggttcccggtgcggcgtacttcagggcttggatctcgagcaggaaaatcgatgcggctgtatagatgctgtatgcgagagagagaacgacgtggctgtcgccgaatgtgcggcggtatagatcgaagagagataggattgatgttgctgatgccatgcactgtacaagatggttcgagtcgtacgcctcggggcgggctttaaccagctcccgagagcagaggattgggcggtggagaaggatgttaatagtatgatatagacagctagaaagggctgagttagaactgtattctaattcacgcaggattgggtacatacttcaaaatcacgatatggctcggtggtgagtatggaggaagatctaccactgccaatttcaagtagtccggaagctcatcccaccagtcactcagattcttggcttgctcctgaacacagtcaaagaactccgagtccgtactttggcggattgggtcgtatatgtggattagaatctgattcaagatttccgccagaccgcacatcttcatgaaacatgacgttgaatgcgcctgcgtcggcggatagtgagcaccgtcagtgaagctaaccccatgaggtgtccatatttcgatctcagcggtgtcatcgagaatcatgcgtggcggactaacgcgagagtgctgcatcgtcggggcccggccgaagtacaatgaaacaaccttatcccagaaataacaactccaaaatagacggttccggatttcaatatcctcatcactcaaatgagcagatcctgaatatttccggctgtcgatggagatacccaagtcgtccagcagccggaaggccatgccactgtatagccaagcttgcgtccgatttccacggccgcattcctgggcactgagaaggagtaatgtctgaatgctagggatgcccgcataaccaactttgagggagccgaacaccccagtcaatgcgcgatgggagaattgtgcaccgccgtcataggagtccagcagcgggccgacctgaggctccgctttgcaccagcgtaccgagtgcgaaagaatggcattcaataaaacgtccgagtaataagctccattgattttcatatcacctatttggggaggttagtgtcatatgttgtctgaaatgacaaggtcgaacagacgtgtaaatgcaggacggtagacaaaattccacagcggctggatccagcaccaatgcgagtcgagaagatactggaaaggctcctgcaggactgtatcagcatatgcatcccttgaacaatataatccaccaggacccataccggcatagcagccatttgctcgaatgccctctctcgccatgcgctattaacaagccgctctttgcgcccctccagttcctccgtgtaatgtgaagtcggcgtcgttccactcaccagcccactgggtagctggaacaaactagtcggcccgtgaaatgagacgcgaccgtcattttccacattgagaccctcaaatgcccgggtgagatcttcagcatcgggatcgatctttatccttggtccgctcgagctggactcagccgacgacggcgatctggtcttccgcacctcttctccctcacgactcttcgataaagcatcctccaactgcgcaaccctagcctcaagctgttttgtgtaagataaagtcggggctctatgagagagacaagagtgtcagcgactgcgacgcggcaaaggaatagaataaagaggaagggatcgactcacaagctatacacacactgctcgctacgcgcggcgcatcgcgaacacgacggactagcgccgttacatttaacctggcgagtagttagctcggaaatctcgggtttcgtccgagaggatccgcacgtaccttgcgtttacgacaggcctcgcatgagaaggcgctcttccgggggagacggggtttggaaggctctgccattcccgatttggcgttttaaactcccaactcgtggataaatacccctcaaaaggtcaaaatgaaaacaggagagaagactttgggcccctacgtggggcgcggggatagcctttttagaaaatgagatttgacataaattggggtagaagactttgattggtggaggatttggagatgaggaggcatctgggctccacgggaggttatttttatataccctagccttaggtagtatgtggtagttatgttgtacttgtacacttaatagccaaggcaattatatatcaaatgctatttgcatggtattcaattgtacacacgattcatacatcccttatttcttccctttcttgaaacctggcttgcccttacccttgcccttcttgggatccttagcagactcagcatcacccttgccctttttccacccgatattaccatcgtgtctcatctgcgcatcgtcaagacgcttcttgtccttattgctaagcttgacattgcttctcttggtattgggaccgttcaattcgacggcacccagcttgcgagaaaccttcttgtccttctcggtctcgaaccatgtccgcttcggccgcgacatgatctcgtttccgtgcttcatgaggttctcgcccttggtgaattgcatctccgcttgagagaactgcttctcggtcttctcctcttgcaagatctcggcaacctcgtcggccatatcctcggccttttgcgcccagctgtcggcaacagcttgctcgaccacacgactgacgatcttggcgccttgggccttgcctgcgcggacggcaagcttgacgaccttgcggtcgggctcggcagcaatcgtgcacgcacgaccggagcggccggcacgggctgtacgtccaacacgatgcaggtagatctcatggctctggggagcctcgtagttaatgacggtctcaacacccttgatatcgagaccacgagatgcaacgtcggtggcgagaaggaaggcaaccttgccatctcggaagttttcgacggatttgatacgctgcatgggaggttagtggtgctgtagatataggacaagagttgttgttacatacctgttcttggctcagactaccgtgtagttctgctgccttcaagcccaataggccgaaaatgatacggacgcggtgagcttctttcttctgtcggaagaagataataacgcgctttgagtaggcctctttgcacaggtacagaaggtaaccgagacgcttgtcctcccgtccgggacggagacgcacgaactcttgaataagggtggatacagtgtgcttcttggcatcaaccatcaagcgcattgggcggttcataccaacacgaataagtttgtcaattgagtctgtcatcgtcgcggagaagagcatagtctggcgagatttgggaatcgtggtgagaatctcgttcaactcatcggcgaaaccatcctcaagcatacgatctgcctcatcaagaaccaaaatctccagggtatcgactgtgaaactgggcgagttgcgcatgtgatcaatgaaacgaccgggagtggcaatgatgacatcggggcgctttttgagcacattctcctgctcgcgaagactgaaaccaccaaccaattgacagaatgtgacgtctgtgaaggtggccagtttgacggaaacattgtaacattgaacagccaactcacgagtgggcatcagaatcacaacacgacttgtaggaaccttgcggggacggaagaggagacgttcgaggatgggaacaatgaaggcagcggtctttcctgaaccagtcaccgcactaccgacgatatccttgcccaacagagcaacgggaatcgccttgcgttggataggagtcgggtctgtaaatccaactgcggcaagacctcgaaggatgggacgggaaagattgaattcttggaaagtcatcttggccatgttggccttggtgtcgaccttttcttcgggggcaaagaacgctttgcgcttctctgcttcctcctcgtccacctcgctctctacatcggactctcggtctgagcccatgtcgtcggggtgaccgacgggtgtggcgacagagtcgttatcagatgcagcatcgtcatcggaatcctcattatcatccttgtcctcgtcgtcctcctcgccttcgtccccagagccaggctcggggccctcagcatcactctcatcctcgccatccgcacccatgccgaaggcgtcgtcagccatgagctcatcgtcgttgaagtcaacaggcatttcgtcgcccgatgcagcatcgtcttcagatgcgctggcgctctcttccttctcgacagcgttctttttctgtttcttagcagcagcctcatccttcttggcctgcctccgctcaatgatatcgtcaatatcgacagctttcttgtcgccggaacgcttcttctcgttgtcatcaataccccaaccatcgaagccttcagtgacaccctggttcgcgacaccgccaacatcgaactcgaactcggggtttaagacgccgtcgtcttctgttgcatctgctgccgcatcatcgtcttcctcttcagactcgggttcagctgcgggctcggcattcttcttgttcttcttggagtttttcaattgcagcttttcctgctgcttctgcttcttgttctttggcttgactgcttcgacctcgcgcttgcgctttttgttatctgttgccggcgcattatcgtcttgcatctcgttgtcgtcatcttcttcttcgacagggggttcgttctcgtcgtcggaaagcgtgaatacgaaatcatcgtctttggcggaactccgcttcgccgattgaggagccattttgggggctggcgcaaattccagtgaagttttggtagctggatgccttccacactctctcaaacagacttaatagaaaattctagacccccaaacactgtgcaagcaactcaatctcgccgagaagaaatggatcaacatgcaaaaaaaaagttccccgggcggtgacaagaaaatttccgatgacataatcaaccgctttgagatgattgtcaacggctctactccacggctgcctggttgatgttctatcccattactacaaggctattaagaaagaaagaatcaataaaggcgtactgtctcaatcaactgctacctaaataggcattcctccctttctcattattccccccgtatgcccttccacatcgatctttttttggtgagacatccaatagattctagacacagattcatctgtctctcatttatctcattttcttttccgatttttctgtttctgtttctgtttctgtttctcttttccttccagactgtcgttctctccctgtcgccagatttcccgaagatgatctccgtccatgttctcgttcattcgcaggctcatcagaggtagttaagtatcacatgggtagcactatcctggggctgggcttgagtctggggtcggttattggtcacatatgtggccttgaggcgacgggccatgtaagtaaggtcgaaactaagaataggcgtcagtaaatgcaccaagctgaaagtgaaaacacaagatgagacccacccattgccacgctccactctcgcattctcgagtacgcccttgtccttgaagccaaagtccctctccaaccacttcttgatccaggcattctcctcagcttccgcagacgttgcaatggcgcaaaccattgatgtgaaggggtggccatagcccgcaccatactgcactgtgccggtttggtcaaactcataatcggtgctttgcttataggtcccatcaaagcaagagaggaccatatcgaccagtgcccgtccgatgtgctgattcttgttgcccttttggacgaagacatgcagttcacccatgtgcttctcagcactattgccgtgccgatggaattcgacataggcgtagccaaccacagggtcaatctggttgcggcacaagcgcaccggcggacgtcgggcagccacaacgaaggggagattgttatcccggcaaaattgaagaagctcctcaaactcattcgcctccatagattggagtttgctacccaaagctgagttttgtgcataccacttcatgatttcaaggatagaagaagtatcatactgctctgcggggcgcaggtagatgccgggtggaacgacttttgaatctggtggtagtgctagccaggcgcggtgagccgcagtgcgacgcaggtgctcttgttgttcctgctctttctttattcgtctttggttgaccttccccaggttgtagacatagccttccgatgtctcgtgccaatgaaggcgtgtctgctcgtctttcatgttcctgggggtggggatatgcttgatgtcagacagaatcatagaatgctgcccatcggggatcgcggttccgtcaaagaaggcaacatgaaagatatcaacccgacttcctgccggaagctggtcccaccagctgcgaaactgctctctgacactcgcgttaggaagatcaaacgatgaaatcctgtgtctgagttctcgccattgattatctgcttcttgggtgtcccaagtgcagtcatcaggaagagttcgatcaggctcgtaaacagcttcgttgcattctgatgtgagcgtgaggattccatcctggacaattgggaagatacggcgagattttccgtatgccttggcttgaattttctgccggacattacgctgggtccgaatgtccacattgttggacgatttggccttcttttcgattcctccaagttcatcattaggaatgaactcgggtgggtcagctgcccatggctcaggttcctgaataccttcggcattcctgggctttgcgagcaacttatagacactgctgctcatatcggccccaggtccatccctcgctgcgggaagcatctcagggcaagagtgactgtcgttgtccatgccgaagagaggctgctgcacaggcattttctttctcctgcgtttgtcaaactgtttggacaaatcccaagtctgtgcccagctcagattgtctaagctctgtatcagcttgtttctccccgtctcatccatggattcaaaagcctcaagcatagctgaactagaggaatttgagagcactgtcgattttggcttgttgggtttctcaggcgacttccgagaggcagcatttctatcccggaatggcatagatatttcaacctcctctgccatatcgatatgaataagagtttctggtagatgttgagtcagccgggattctagaacatcactcataccgcttctttggtttgttcggcacgtgtgtcacctgggggtggcattgtgtttgttactcaaagagtgcgacataaaatgttcggtaacaagcatacctgagtaatgggatgtactgtagtcacgagactgcagagcacgttctgtattgcgaatatgctgactgagaagaataaatgattgaagtgatgaaaggcggagaggcagacggagaggcaggcggagagatgaagatgggaggatgagagtggaataggcgaagaaggagagtgagggagaggaaggagggagggggtggttattacggcagctcgtccatgaaatgccagacactttgggcaatatcaagcatgtcgctgtgtgacatgacgaaatctgtttcgctgttcctcttcgcgcggaggtaacattcctggaatggaatttggattgatcccgaaatttggtggtcctcagaatcgtgatttcggtttcgaacgatccacatcttttgaacggacttgacggaattcccttcgactgcccatttctcaatggtgatagtccccctctcagtagttcttatagtcaacatgacttggacttgctggtttgactcatggaaccagaacgaagcatcttccttcaatttcttgagtgtttcagaccaccctgcctccacaaccaccgttggccattttacatctctgttaggtgggtaaccttgaggcctccaggtacaacttggtttcttcgcccttgtggtcccctcgacactcccgccgggtaccagacgactctcctgggccctatgccaagaagcgaatatctcaaggaaagtaccccatgaggtctcgtgtatagaagaaaccgtcaccctgaggataagagtctgggaggagaagtaataactcaagaatgctttttgaagtagcctgtctgcagacttattgtcgaaatcttcccggaaggcacgcctatctacgtgatcaaatataatatatgatgactggcctttcctataacgctttgattcaagttcaaggcatctaacacattgctctgcatcttgatacctgtatcttggtgttgtagcaggaaggccttcatttcttaagatatcttccgccatgatgattgcggagcgaagcgaagcaattataaatccgtagttggttgttgaaactgatgggagcgatgaaatatatggcaatcttggaagcatgacggtcaatgacgtgattaggaaacgtagccctagaggtagattgccaggtagtatacaagacctctacaatcgtatcaacttgccttccatgtcaagattctttaaaaactagtacaaaggacaccaaaaaagacatacaatggttatgaaccatgtgatatacaacttgggggtatcataccaattacggtagacatacctaaagtattcgctactgatatgtggcggtctcgcatcaaatccaacatcccttaaaagcggtctttaccaatggttaccgagaatacctgtttagcgtgtagctggtccccaacacgtcaagacgcaggtccaatacagtgcctattgaaaccatcaaatatagggggaaatacaccagcatgatattcagataaatgtatttaaatataaagtcactttgtagtaacgggaaggaacataatatcggccgatccataaacacgtcaaaccccatcttgagcctggcaagatttttccctttccaactctctcaaaaaaataccctgcggtatattttcgcagccatgttgtccatacttcggaaagcccgcttaaaggataaagaaatgcggatattgatgctgtatgaactctgatcgggtcgttcaggccgagatgctaatgattgcaggggtcttgataatgccggcaagacgaccatcgtcaagcgaattatgaaagaggatgttacgacggttagcccgactctaggatttatcatcaagacaattgactttatggggtaatttcgatcttgttaatatcgcgagctctgctaactcgccgcagatacaaactcaacatatgtgagcttaccgggtctctggtggggactgcgtactgacaacactaggggatgttggaggacaaaaaaccctccgatcatactggaaaaactattttgaaaagaccgacacgctagtatgggttgtcgatgccacagatcgactccgggttgacgattgtcgacaggagctctcgggtctgcttcttgaagaggtacggatgacgtttccaccccaacccgcaaatcttaagagtgtcaactgaacccattctaccagcgccttacgggagctagtctattggtgttcttgaataagacagatgtggaacattgcatgggcgagcaggaggttcgagaagtaggtctaaattcctcctttgaatttcatgccgtttgccggaggctaatgtctctgcagcgtctcaaattggattcaatcaaaacacacaagtggactatcttgccatgcagtgcaatgacgggcatgaatttgaatgaaggtctagaatgggtggtacaagatgccaaggaccgactgttcctttactagtgaacaggggaaatcggcgtgtttcctcttgatatccacgctaataagatatttaatagttattttaagtgatcttattaagtttttagatcgatctattcatatatctggccaacccgtgttgtttcccctgttatatctgaactaacgttcggtcgtattctaaaaatctccaatgcggtgcattttatgttctaaagaaatagcctagtacatgttaaattgtaaaagaaccaggctgcccatatctgataggctagagtcaaagaatagaaagacaagagttgaaaagtaacaagtgtctcctttcatggattctgtacggagcgcggagtacaacctaacgttatgcaaggcacaaactgatatatataaccataccaaaatagccacatatgacccaaccgtgacccaaccgtgacccaacctatccctttaacccctgaaaagaagaaaaccaaaagaaccagggaaaaacgagggaaaagccatggaaagagaaaactgcggggcccaatcgctccacataaataatgggagtaaacaaactcctatgtgtgacggattcaggtttggtcggtatagacgcatctatccatgtctatagtctagaaaaaataataggattgtagcaaaacagcaggataaatagattaaaaagatccatgaaaaagtgatgtgtgagccaatgaattggttgatcatcgccagtcccgatttaatttaaacagggcggagaacacagcccttcttccaccctacaactcttcccccctcatttgtttcgtttgaggaggcgtgcatgaacgccgagagtcttacatcatggctgctcccaccgagagttccgaggatgtcaatgatttccttgagcgcatccgggaactaggcgaccgccgtgacaaggaagacgacgagcggaccaagaaactagaggaggagatcctgcagggccggaaggaaaggcaagcccggagagctggtatatactccttcccttgatgcacgcaatttctgcactgtcacggcatctgctgcaggtcaacaatgtgctgatatctggatgactcaaaaaacagagcgtgcacgatcactcgccctcaccgacgattcatccaccctcaatatcgcacgactgagcacttcatctatcagcacccggtcgatcgaccctccggaactccttgagccaacactgaaaacaccgcaaaccccaggacccgagccaccgatcccgagcgtggattcgagtcaagacatggagccctccgatgccgacaagcggcggggatcaatcccggatctcggattggatctcggattggattctccctcgcggacacgactacccatgtctcgcaaccgcgcagggactttgtcatggcagcaacgcccctcctcacgggacttcggcatgtcacccgcttcaacatccccaactcgctccccaactcgtgcaagccacctgagaaatttgtctacggcatcggatgagaatacactgtctcaactccaattcggattcccgcagcccgggaaggatgcccctgtgctccctccatcaccggaccgcggggctgaatcggtagcacacagcgagaaagaggaacagatggatagccaaacagacgtgattgtggagcatcaagagcccgaggtggttgaagacccaaatcccgaactagatcaacaggaagcagtagaagagacatcaccgtcgcccccgaggactggttctcgtgatagcaacatgagccatcgcttctctgtatcgtcggtttcagccactggactggggtcgccagtgcacctgtcagagactacgaagctcgagcctcgacagaatgattcctcgttggaggagtccatgtcgccgtctcctacccagcggcggatgtcaccagagcgaacacggtcgacctcacccaccaagggcctgggaggctttgttcagagtgctatgatgagaagatcagatagtgtgtcaaaaaggtggagtgcacaaactccacaggggcttgggcggtcaaattccattgtgtcaaaccgcagcagtgtggctggtccaagtttgagtgaaatgacccctccaactcttggacgaatcaaccgtgactctacaactctcctacaaagaccaggctccagccacagcgaggcagccaccgagacacccgaacgaccaaccacagcggataaagacactgtgaattttgacagcccaggaaaatcattccgacctggtcactctcgctctgctagctctgccaccgcagaaggcagtgaatctcaaagtccgtttgtctcgaaaacaatggaccccaggcgctggagccccaacaaggcttcttggttggagagtgccctcaaccgacccgagctaccacgacaaaccagcagacccccctcgcagcccaactgggccaaagaccgacagtcgaaaggtagcgtggatttgggacgagtcaacaatttcaaggaagtcacccctctcggtttgatgcgaacacctccgccaggaactcatacaaaactgcctgggctctctgttccatcgcttccaacaagccctatcaaagatggtgttccagagtctccaataggattccctctgaagaagattggtatccctggtccatcggttcctacgacccctatcaaggatcctgagtctccaataggatttcctctgaagaaagttggtgtctcaggctcatctcttcacaggaactccgtctcagatcctccctcggaattccctttcaagaagtccggtaccgctggagggtcagttagcggaagccctgaaggcaagctcaaagatgcagcacccgagtctcccttgggattccccttgaaaaagcccctcagtgcgggttcatcacttcacagaaactccgtctcagatcctccttcggaatttcctttcaagaaatccggcacccctggagggtcagtcagtggaagccccgaaggcaagctcagagatgcagtacccgagtctcccttgggattccctctcaagaagcccctcagtgcgggttcatcacttcataggaattccatctcagatcctccctcggaattcccactcaagaggcccagtgtctctggtcactcagtttctggaagcattgctaccgttcctgaatctccgtcggagttttcatccaagaaacacagtatctctggttcctcaatccctggaacccccgatggcaaatcgaaggagatagttccacaatctccgtcagttctcggtggccctgacgctggacaaacagaagaggaaaccccagcttctccatcgcctgtcgaggaacctctcaatgccctgtcaagcgatgcaccaacggaggaacccaagtctgcttctcccgctgaaactgagaatgagtcgcaagaactacctgcatctgaagagtccgagcctcaatctactcccactcgcagggaccctcccgactctttgagccccaaaccaaacttttccatctctacttcttcgcgggtgcccatttcacccatggtgaagccacagtctcccgtgctggacttccgagcaaacctgcggaaacgagaagtcgtcaaagacaacggagaggacaaagaaccagaatttaaaaatgtatttggacgcctcaaaaagactgaacctcgcagctacgttccccctgatgcgctcaagggcaatatcctactaggcaaagctgcgctgaataacaccggcggaccaaagaagaccgagcgagttgatgaatttaggaagagccttgtggtgcgcaaagatgaaatgaaagccggcgggggctccatcagacggaatacagctggagagcaggatgcgccaccaagacagactgagttcgtaccagaagcaattgctatgcgacaaaatatgacccgggcaaacagcatcaagcagccacttgtgggtgagccggtatcgcctactaaaagctttgcttctcgaatttcgcaggacagaccattgtcgtccccgaagtcatctatcaaaggcatcggttcatcgcgagcttctcaggaacaagaaccattgtcgccatatgctgccgatgatgagccgacatctcccgctaaaagctttgcttctcgtgcttcggacaaaccattgtcgtccccgaattcatctttcaagggaatagtttcatcgcgagcttctcgggaacaacaaccgttgtcgccattccctgctaatgatgagccgggctggcccttgaaagacaccagttcctcgcgtacatctcaacaatcacagccgttctcaccgttccctgccgatgatcccagcgatgagccaggggagacaatccccgcggcgagcgactacaagcaaacccccgaggtggtatcttcagtgaaacaggaggaaaccccaaaagccgttgcaccaattgagcctagcatagtgaagatgcaggaaccctcagtcaggacactccgcccagttcgtcaatggccaccggcacctgttgcagaggctactgcgactccaactctagcacctaaaagcaaattggcgggccgaatcaaccctgcgctagctggcctactttctcgtggcgcgcctgccggtgacggaccgaagaagcaactggcaacccctgtctcagcgccgagtaaccctgcctcgccatctgcgcctctcacgcacgtcacaaagggtcgtgccagaggcccgaagagacgacttccccagacaattgatgtctcgaccccgcccgctcggaatgctattaaggaggttggtgctatttcctatgaagccaccccgccagagactcctacaatccctgttgagtccttggacatcgattcggagtacctgtcgcagtctgatgaagacccagttcctgacatcaaaaccccccgtgcagacagcgcagtcaccgagcaatttccggaggtaaacactcctccccaggatacccttgaacgcgatacgcccacacccgaaagtaatttccagcgcgctctccagaccccttccctaacaacgaatttcgacatgtttccctccgccaatcttgaggcgacacccagggaacccgaaagccctggagaggtgagtccatctagcggaccacccgtcccgccgaagtttgattctcccgtctcccccttgcctgtaacgacaaagacacaatggggccagcaaaaccggtttacgtcctcatcaccgtacgctctcctaacaagccagaaagtgaaccaaatagaatcacctatgagtcaggagaagagcatccccgatgttaccgtcgagtcatcacgcagttccgtctcacggcccttgagccatccctccccgccagtacctcctaaagacgatgatgttatgctccataagccacccaatccgcgcagactttcaagaaagatgtccgctccatcactagtggcgcaagctagtgaggcacgtgaggtaattgcgggcttcttcaagacaatccctaacgctcgaaaccgcatggacattgatccccagctgatggtaatgcgtaagccggatgatgttaagatcaggaccgtgaagctacatatctgggagctcacaggtgatgggaggcgtcaggaacttccttcccacctggagtacattctataccaaggcagcatgtatctctgcgtgcatacattcgagaccgaacgaggcaacgtttcggaagtatacctttggcgtggagacgatgtccccgacgcctcggtggataatgaacagccgtttgcacgcaaagtcgctcgtgaaaatagctccaagttgcaaatcattcgacaaggcaatgagcccaggcggttcatccaagcgcttggtggcattatgatcacgcgtcggggatccagctcccgccacaattcatcggctctttacatgctttgtggccggaaacacttgggcgagatgaccttcgatgaagtggattactcgctgcgcaatctctgctctggtttcccttacgttgtctctgctccgtttggcaagctctacctatggaagggcaaaggtagtggccctgaagagaccggtgcagcccgacttatcggcatggacctaggtctgaccggagagtttgaagaagtcaccgagggtgaagaacccgacgatttcttcgatgtcttcgcagggcccagggaggccgcaccgcacatgtgccaggattactggaagctcaagccgaagtacaaccacttcggcatgcgtctcctccgcgtcgaccacgaagtgaacccgccaactcgtttctggaatatccgccgtccgggcgcaggtgcaccagtggttaatgccaacgattgcgttcaagaaatagagccattctgctaccgagacattgtcgagaaagatgtttacgttctggacaccttctttgagatctacgtgtaagtaccaccgtacgacaatgccctccactcgactgatgctaattccctcacagtattgttggcgagcaagcctcacagaagtctgccgatttcgcctcggcggtggtcttcgcgcatgaatatggtattcttgccacatccctccaggaccgaccattcatccccaagagttacgtggccctcggcggcatccccgaccgctgccaaagcgcattccgcaaatggaacccacgtgcccagcatgcgcctttcgtgttctctctggatgttgttatcgaggcgattcgatcaccagaggagaattgagtgatatcttgcgttttttatctgatttttgggggggcttctgctttgaatttgtgcatatttcggtttgtacaggctttacagagcatttcggagtcctgtgtacttgtgccatatttgcgccatagagggaactggagcatctggggactgttgggatgtagatagggggatttcgcatttgatggtgtatttaggcatttttagcaattcaagtttcataccgaggctgcctattacctaggcttttcttatcttttgagattacatatacaacacagaaattaaaacataaacatctgaatcctcgggcaatttaggatattcaagataatccatggatgcaatggttatggacgggaacggaaaaccgatcggagataaaaaaaaaatcatccgatctggaatgtcgccatcctcgatctttcgatcgttcgatcggacttgtgaataatttctccattcttacatgctactcttcctcatggcaatgtaaatattcgagtcatggacccctccatccttcgcgagctctcgaagctcgaccccgcgctacccttccgcgcatcgaccgatcatttgcatcacacatgggccaagacattcttttcgcgcccggagttgtacattcgtccacaaaccattccagagatccaacagctagtgactctcgcccgtcgctgtcgtcgccgcatcgtaacagtcggcagcggccactcgccctccgatctgacctgcacctcgtcctggctcgtcaacctcgacgacttcaatcgcatcctccacgttgacccgtcaaccggctcggtaaccgtcgaagcggggatacgattgcacgcgctgggaagagaactggacaaacatggcttgacactcgagaacctcggcagcatcgacagccagtccatagcaggcgtcatcgccactggcacccacggcagctcccttcgccacggcctggtgtcagaatgcatcgactcgctcggcctggtactcgccaatggccagcacgtccgctgcagcccgacaaacaacccagacctgtttcgcgcggggctggtatcgctcggggcgcttgggatcgtcgtcgaggtcaccttcaaggcggcgcccacgttcaagatcgcttggcgccaggagcggtattcgctcgctcgcgtgatggatgaatggtcgatgggtctgtggacatcgcgtgagtttgtgcgcgtgtggtggatgccttatgagaaaggcgctgttgtctggcgtgctgataaaaccgacctcccgctgcgcgctccgccgaaaaccttctacggcgactcgatcggctaccacatctaccataacctcctcgcgctgtccttgtacgtcccgcgcatcctgccgtgggtcgaatggtttgtctttggtatgcagtacggcttccgggccgggtcggtcgtcaccgaggccgttgagcccgcgcgcgagggattgttgatgaactgtctgtattcgcagtttgttaacgaatgggctctcccgctggaaaagggtcccgaggccatcggtaggctttccgcctggctgcacggcgacatggagaccgcgcgcatccccttctcatccaagggactgtacgtgcactgtccggtcgaagtgcgagtctcggacacctcgctgaacaccaagccccgcccattcctggacccgacgtgtcacgacggcccgacgctctacctcaacgcaacgctttatcgtccctacctccgcgacccgccgtgtaaagaacgctactacgaagccttcgaatggctgatgcgagagatgggtgggaagccacactgggcgaagaacttccacacaaactcacacgagctgggcgcctcgtacgggtcagacatggagtcgtggattaaagtgcgttcggaggtcgatgctgacgggatgttcgtgggcgaatggcatcggcgtcacctgcccctggaactcgggcaggcaagcgcagcacctgcaggcgagcggctgcccctcctcgagcgcgagcacgaacgtcgcagggtagacattaatggcgtcggcgatggcgtcgaatgggtaggggatcgccgatggcaggctcaggctcagcgacaaccttttgatgcgctggatatggagaagagcctgtatccattaccgccagatcactctcctagtccgcctgggacggcgagcagcgaggagagctttgatttgcttgccaggggtgaagcgagcatattgctccccgacggaccgggggtgtgagaggagagaaatcaggctccggtcgaaagcaaacaatctcttgttgtcgggtgcgcgagtcctgattattccgttgcttttgcatctgctgatctatcggtgattgttctgactggtccattcccgggctgtgttgtggcttattggggtgcttattggctctacgggctaatttggtgattatccccgtcactttcgtttttttttcctcttttttctttttcccctccccctttgttcgaagcaatttggggatgataaattacaattggttggcaaatctgacatccgaggatgttcaggcttcgaatcctccaactgtttccccaaaaatgagggctttttttagatctccttcctatatggaacattacatggaacatatagagggatattacatattgcatactgcatattcccctgcttttacccttgttttgcttttttcaccccccattttccatttgccaaggctaaaccagagaaatcgtatggcctcgtggtctctaacttgaaatttgaatctgtcggtgaacgagtctgcatgtttgatgcaggtgcccataagctcttcgatagggcgaggtttgtctgcttttttgcttttgaaaatatgcatacaacatacagcagtcaatagttgttccattcttgtacacactgtggccaatttacgcagaatagattatcttgtttctatggatcggggaggaaagaatcacactgtgctgtgtgtgtccgtgtcttgtccttgtccctttcccttgtcccctgttccctgtcttgtcacagctgagagaccttgagatagtccatgtatagagtacccaacaaacctttcttacacattgcacaggtctatacaggtccattgatttcattgcactccatggtctagacaaccggcaaaccggggattcaggattgatatttatctgcttgatatgagggatgagggaaaggaagagagagtacagatgtactttgtagatcagtgataccctgtatggtattgcagctcgagctgagcactgtgctgcctggtatgtatacttagtatacctcacacattacactgccaccgtacaaacgagagatcaatgcaaagatctagcctagacaactgttcagattagggctggatctgatcattgcacacttgattctgtgcgagaatgcaggcagtaccagggtaatattgtacgaagatagaggcatcaagacagaacagccctaatcggatacataatcaggggaatatcaccccgctttgtatcagaaatactcttccttgtccatcagcctctttaactctttttctttcggaggctgagagcctaacagttgattgtcgctatcatgttcgcatattggcatattctggcatatcatgttgtaccacgtttcggtgcagctggcaaggatgtctatatgtccgatgctttttttcaccgacttctttttatctcgcattgacccctccatagctgcagattgactaggtaattgattggatctttcttctcatcgcaaatgactcggagttggcctttctcattctccaggcacgtgtgttggggatctctctctgacgtgcagtgtcagccttcgaggggaaaatatcgtgtgacaaggaacgttacctctctctgtcgtttcctgcccaatgactgggatcaaatctcacggactcacggctgggactgtgtcattgtactggtctctgggtatcctaagcagtcgcctaaatgtctacggtctacctgcttgccctgggattcaaaccacatgtcaccaccctcgtcaccctcgaacgctttgaacagtctctccacgtcacggcttagctgctgatgcgggggacgacgtctctgcacctttgataatcatgatatcaacctttggcgctggcggctgaatgccggtttcattatcatccaccccacctgctcgattcttttctttttctctgtttttcttttttatttgggtcaaagctctctctccctctcttctcaatcttgagatcttgctctttcttcttctttctttctccacccttcctcttgcattgcaatatctacctcccttgcttggtttccggtggagtttccaatatgatacaatccatgtcgtggcagccaaagcttcgccccaagggtttcccgcatagcattgatggctttgctgcggtggcttcgttgtcggagctggagcatcgggcccggactgaggacaagcgggaccaacgcgtcttccgggtcaagcgtaagcatgttttgaaagcctgtgatcgctgtcgcgtgaagaagaccaaggtatgtcaatacaccaggagaccttgatttgcctaatcttgttagtgtgatgggaagcagccttgcaatcgctgctcggtatacaaccacccttgtctattccgcgaaagaaaggccactcagaccaaagtatactctcgagggtgagtacatgcagagaatctcaagccagacatttcctcaagctcatagacaaaccatgcacagattcgtcgaaatgctcgaatcccaccattccctagtggtaaaggcccttcagaagctctataaattctgcgtcaacaacgaaggcttcccaggcgatcccctcgccgaagccccagacggacaccccctaacacatgcaatcctcgaccgtctggggctaatcaaacaagccgaagaaaacgccgacgagccagacgaggactcagaggatctgcgctacctacgactgctatcaacatccaccgaatgcagcgtcacagcagagccctcgccagagccagcaacacccccagagccctcacccatctctcgccctaccgcaattcccacaccagtctccgtccctaaccgcacccccaccaccacaagctggcagtgggatccccagcccgttcaccagacgagctacagctacccagacgcagggtaccacgacttgatggtgatgcagcaacggtcgtccatgagtgcaccggacatgggcgctgatattgcgcatattggtctgccctctgggccttcaggtctaccacatattccgcaacatgcgcacctcgagccgccgttcccgtatgtcttggatggatgctgcgatcccggcaccccccaacatgatgtcaagcccgtgctgtcgaggctaccgtccggtctcatggctgagtctcattcgcatccgcaccatcttgggaatctctcggtggagatgatgggtgactacaatttccagcatgacccggcgtattatcctgggtttacacccggctggaattttccttctggttaaatctgttttggtatttgctggactgtttctcttgtcttttggagatacatggtctttgtttatgatttgggttttttggtacaagctgttgagcagctagtttcatttcacttcttatctatatttcacattctcttttctatttctcgtcattatgatttgcattcttcttgagctcttttctttctctttttctcactctatacccccctcatctgaatttgaacaccaccggagcatggagcacgatatgtccggcacattgagccctaatccttttggccagtcctttttttccttctcgggctcagccaggtctttctttggatcgtcattattgatcttgatttggatttcctttgattctggtatctagtttgaaagagtatcaccctatcaatttaggtcctatatgcctttggtcttttcattttcctcttaccgctagcgctcgcgttagtccttgggtagaccctgtctttgtatagaatgggttaggggtggttacttacaatgagatatggattagcatagtatcatacctttgacagatagacattctccgacttggggttatacttcccagccacggccatattcaaacaataccaacgacgacgcccacaaatcctgcacataacacatgatacatacatcccacccaaccagtccaacatccccaacaaaagataacacaagaatagaaaatcggctcacaccagatctagatctcgcaccaggtcatatggtcgtacaatgcacgacctgacacagattcatctagcatcaacttggaaaagaaagacagccgcagagatctgaaaatagttaggagcggcagatcagatcgtatcggatcgtattcgcggcaagtgcgtctgtcgtctttccttccctgtttgggctggaggactggggagggagggctaggactaggctgcgtgcgggaaggttgtttgtgggacttgagaacatgctttgtcgggggttgctgcttgctggggttgtttgtgtaccctggttttgtacggagtacattggtggatatactaagatcgatgtagatgtaggtgatcttccgatatatatatctaagaaagggagatgcagtgtgatataggacagagaatgacattagacattgcaatataaaatatatatcgcatcatgctctcgtcctatcatgcctggtggaaatatgttattttcttgtaatccatttggttggttttgcctatacctcctccctcgcactctcccggtgtttgtttaatggagacctattcactcttgccacttccacatgtgttttgtaagacacactgcaactacggcgcttccggggatgtgcccgaaattcaacatctccggccaagggtttgccgactcgatttgtaggaaatcgaaatcgccgaagacttgccgacgcctcgctcttaacataatcacgagataaatggcctgtaaatctccagatcgccatcgtggttctatctctttgaacccatgtccccttccgcttccgggatctttcaaccagtatgaatgtgattactacctctgcagtaccctttgaagtaccctttgctaatcctggagccgtatatgcatatatagacaggatagtatcggccggggtccaatcggctgccgctctacttagtgaggcccaggaggacttagtgaccagattagggatgtgggtcagtaggtaatggatcagacaccaatcaggaccgctctgtgttgcttagtaataatttagtatttatttttcagagggcgatcagtcacgtggtcctggtcaaggtaccatatataagccccagcagcagcttggaggtttacacctcctatgaagtccacactcttctttcaacagtatccttcacactgtctacaaaatacaagtgaaatacttcttggatataggtgcgaaacacattcaaatgaacgactcggaaatatccagttaacacaccaatacttgatccagcacatcaagcgtgttgcaatatgatatctagcaatatgaaaaccgaagacagcggcagctctgtccctccaactcctcctcctacccctgctcccagacaccaggctctatcatggagaggttttgcagagacatttgtgattaactttgtgacttccatggctgccaccaataccagaaacgtcgtcttcaagtccgacaatccttaccttctgtgtgggatttatgcatgttttcttacgttgtttacttttctgtatcggaaattccaggctctttacttgcggatggataagtgaacctgggatcaaggatgagagcttactcatagcataagctagctacgtattatttcgactgcctggctccatgttgcatcaggattggcctctaatcgactcggaatatgatcggaggatgagctggctggatcaggagcaggatacgcgagcaaaagcccgtaaagcgacatgtcgacccacagaaaggatcgggatcagagtcctaagtggggagggaagagggggatcttcattcttccagaaaacttgtcagtatccctgtctaatttgaggcgaagtgataaaagccgtaactagttagccattcaagacacatacaacatagacgggtggatcttggtatctaatagccatcgacttgagggttggttcaaggcatgagctaggtacaacgcgaattacttagcaatcccacacccatccatcgctaactaagctttcttgccaatccgattcaaccgaagcagcctaggcttcctcggccttatctgacgtgacgtgaaattggcgacagatctacaagatactctgaatcgtttgttcgcacgtctttaacagccaatcgtctttggtatcggcttttcccaccatattcactcaagtgatgtggtttttttacatccattcctcggtgatgtagaccaatggcaaaagcaccgcatgcgaagggtagttggggtcaggtatttctctctcttcttcttcttcctcgactggacagcttcttgaagatggggttctttggaccggatgaagagtttatcgaggttatgctttaaagttgttgtgcctaatgacattcggaatttcctataggattagaatccagacgaacgcttttaatttgacatggtaggttttatcggagatagacatggactagtcggccagtgtattttcaaaaaaaaattaatacatttattcaatccagactctattttaaatctgaaagtagccctgttgaatcactgtaccgcgatgatcaggaggacccggactgacaccaaccattacccagaggagtaacgagttcgtagacagcgaggttgaatgacatcgccacacccaagtccctccataattacccgatgaataagaaaattcgaattcgacaccagaaaacgccttggtggcaacaggcctaagcccagggctagggcagcgcaacgccgagggccagggttcagatcaaagaccagtgttacacatacacatcacacaagctacgctgtgagtacaatcgatcaatcaatgcatgagaaaggaatcaatcctcgtcttccgtctctgtgttggtgtcgctggtatcgcctgcgtcgccgtcggtatcactctcgctggagtcgtcggaatctttggtcttcttcttaggcgcttggccggtcttgatcgcttgcatttggccggcgatggagtctagggagggttagtataagcgaaacaggtagtttagtggtttgggaagacttaccctcgtctggctcgctaatgtcgtcttcctcttgcacggcggctgccttggcaggatcgtcaatgtgcaggatgatttgagccgtgttgtcaagacccagatagctgtcacagatcatgtggaggaggaaggagaagtcgccgacctgtgggggagcctggaactgcatcttgagagtctggacgttgaaggtgggcttgccggcctcgtcgaagatcggcttgtcgaatgtcgtaaatgtgaacggcggtacggccatcttgccctgcttgccgtctgctaggaagatgttccagcgaggggagtgatcgcgcgctaggtacggtgcgttggccagaggcggctggatgctttcaatctttgcctcaaccttcttaccgtcctccatcttagtggcgctgttcttggctggcttgcgacccatcagggcttccaggtcgtcctcgtcggggtcaatgtcctctaggtcgagcgggttcactgacggtacggatgtgctgcctggcgggatgaagcgggctttgactaccagctgtaccagactgctgggtgtgatcaccttttctcccataaccttaaagaagatccgctcgggttgaagcaagggaagttgcttggcaactgatacggcgtcggtgtattgcttatcggatagaagaccagcgccgacagtaagactgcgtcgctgagcctctggtagttccatgtacctttggacggtgagatgttccttggcgtcttcgccctctacggacttgacaatggcctcggtgaagttgggaagttgcagcagtggtgatgagcccggggacacagcctggatgaggttctgagacgttttgaaggcaccgacgatcggtccgagattaccaaatgcgagtgaaatagcagtgaaagcttcagtgagagcaagggcgacaggagccgcttcatacttttctgcaggccagttagtggtatttcagaatatcatcggggcttttcttaccagcatccagagaagcatcaccaagatcaattcgcccaagataagcccataacaaagccaaggccttccgacgagaggagctatccaattgcttcagggtatcacggtccttgggcgtaaggaacgaattattatctgccagcacccgcttctcgagcttgttcaggccagactcggcccgggcacccttgagcatatcgttgaattcctcgccagacgacaaagcgctaataatcccaccttcggtaatatcgtccttgtactcacggaaaatgtttccggcactggcgacaagaacgcgctcctttgtgtagcgctgagatccataccaccacttgccgacgatatatggtagaagaacacccaaaagggcaccatagaccatcagaacatatttgccattgccatccatgataatgaacttgggaagggcaataccgatactaaagctctgctttccgtcggggtggccaaattggaggtagttgtttcgcacctcctcatcggtgagagctttatatgccttggtgagctccacgaaacgctcgttgagcatctcgatagtctcattcttagaggggtcaggacgaattttatcggggtgaaagatcaaagacatgcgcttgtaatgtctggagatagctttttcatcggcgttctgtttccaagaatttagtcagtgaaatcccctggacgtaggcacgcgccgagctgaataactcaccctcgagacacccaaaatatcataagggtcgtatgccttcaccactgtcctagcggtgacgacaattaagtagaccatccatgccattacggcatagccgacgacgacggtaataatgcgcttgattcggcgctcttttcggagacgcttgcgcttctgcgcgtcaatgaggtccgcatctttaggtttgaaatcggatttgatgcggggagcggtattctcaagctctgtagatcagatatagcggttagccgggaaccacacatatatagtcccaagtctcacctttgctgggtcgtaggaggttataggtgagagggagagtgaccaggccggtcaaggtgaggatgaagaaggggaagaattgtccctgaaggttcaagttagcgttaccacgtctttatcggatcaaatcccgtccttacctgctcatcataggtgtagtctgacgacatcctgcggcgacttttagggtatagacagcggaggccgctggccgcggaatttaaagattgtgttgcgcagggctgttgatagtagccactttggatggtcaagagaaggcttttgggctaggggaatgacacagtagcctacttagagcccaaaatgctggctcacaagaaacaaaggagtgatgcaggttgggtctatcgcacttcctgatctggtgatgaccgtgtcctctagcagggtccactcaccgcctgccttaaatgggagtgaatacgtggcagttttttgagcggtgcaggcggtgaagacgacatctgatgttctacatcggttgcataactaccgtttgttgttctatcttatgcttcatggctttctacggctttctacggcttggaatgtcaaatatttgtcaaatatgttcatgatttttggtaaatgagctcaaggctgcatatatactaattaaatactctaatagagctgatcgatatccaatcgatccatgcagcagccttcaccacttcctttcagttaggagtcttgacagaacagatccatcgcacacaattctcccctcgtaataaagataaccaagacttctccagtccgcccagaaaaggaattcaagcgtcaacaactcgaggtcggacgcaaactcaaccaatccagacaaagcatcggaagcatcagccagaaaatgcctgattcattttctcatgtgtgtgatacaatcagtggaccatgatcgacacggccgggccaaaagggaccaatccgatacccgaggtatcttcattgctacaagtcggggacccgggaaacccgtgtgatctggcgttctcgccgttatagtgtggtgtgggcgcatttgcagtggccgaccgcagacgcagggcgtgcgcgttgtcggttcattttcgatggcagtttttgttttgtttttgtcgaatgcggattcataggcgtcgcatattcgtaaaatcgttttggtgttttgttcttttttgttgactgaaaaaaaaaagttggggaaacaatccgtccgggaagtctccagacagagagttcagacattcaatctccaagggcacggccactcgttctggaagaaatgtcaggattgttttttcgattgtgtcagaaccgactggtactcacgagttgatgtagtcgagtccaccgaagtactcaagcatccggtaacagaggctcacatcgtcgcccggctcgccaccgaacaaacgacactgtgcttcttccagcccagctgattccagccgcgaggggcgctcacgggtctgccacgctgtatacccatattgccatggtggagcgagggtgggagatccccgtggaatgcatgtgtccggggagttgtcggcagacacaagcgcgcaaaagctgttctggggtgtccgaatggttgatttgacggacaaggtcggatgttgagcgagcagggtattaggtatgcggttggaacgacgagtgcggcgtctattatgcctctggcccattctcggcagttgaagaatcgaggatcaaagaaatggagaaagcacttttaacaccgaggggagcgaccatcacctcctggaaaggatgagatgaggtactgagagaaaaacggcatgcgagattgcaggggtgactctttatagaccgaactcgccaagtgagtcacttaaaggagaaaaatgggcgacccgcttttctgggtgggacccgagggaggagatcaccttgtgcgatcaccttatggctttaagaatggcgccagctcccacaaggtcctgcgctacttccaattggtccaagggcgagttttctatcgcgtcattcgaggacctccagtaatgattagaattaacggcgtttataaaatgaggtgattcgccttagagatgagcctagagatgagcctagagatgaacctagagatgagcctacaatgacattgagtcatccatgaaattgcgaaaaatgaaacacaaaaaatgaaacacaaaatgacgccgtcctctggctgtggcatgaggtgattgggactgatctaggccgatgccggattgcctaaagagtgccgtgcggaccgagcgatgatcacatcagacgatagccagctttcccggctttaccctcatctaccctgacgtaccctaaacaacatggagatgcacaagtacccaatttgcctaaacagcccggagactggcgaggtctccgctgcgattaatacctagcaagggatatttgaatttttacaccttgcgtcgaacaaacgcacgtgtgcaacgtgttcaacgttcaacgtggagaaccttggagattctcagatgccttccaagttccaagccacaaggcaatagagaacggagtcatatttgatttttcttgggagatctcggcaagctaaacgaaaccttggggtggtgactattgactcagatttaaaaatggagtgcctgatctgtgaggataaatatagcccggaagaggaaatttcttcttttgacgcttctagtccaaacagaacaaacagacaaacagacaaacaatgcaaacacccagattctagacctccttactccctacagcagatcgctgtgccaacagtgtttaccgatcactatattccggctcaatgcaatgcgcggtactgtaaatccttcctcgtctgcttcgaagcgtccacttcaatcatccacttcagagctatcgacctacgtaaaaaaaaaaaaaaatgagacgttcattcagtcgttgaccgctgtcttcaagttgtggagtgtactccgtagttagttaccccctactgacatttccaaactaacgattgcgtcttagggatgatcctattcaccatgatctccgtctaggattctccaagctcgggcatgtcatgcaaaaggcagttacaacttaaacttattctacgactcccttgtcaaagtgtgtattgtaggacggttcctgcaccggatatcccgcacctacgcctcatgcatctcggccactacttttcctgagtttacccggtttacccttagtacggtcgatcaaagaccgctgtggagtttactccatcgctccgctggatgtagaatggaagagaataaaaaagaacaaaaaaagaagctgtttcacgtattcgacggatgctgaagttctttatctccacactggggcttcgttttaatggggaactgcccaaagagagacaaaggggctggttgcgattccacacgaaaaggaggttgctcaagctggtgtctgtaggttgaagcagaaggactacgatactacggagtagactgtaagctcttgaggaacaagcgctggaagtcttgtcgatgtattctgcgttcaggggtaagaatcttagattttttcactagcgtggccgtgagggatcgaccggggaacttgaacaatagttatccattgctgccttattctggaaagcagtctttgtctattcatgtacgatgcgaggctctacccaaaacaaagacttgaaaaagcgtaatatttgagatcaaagggatcatctatgttggtcgaggtcgagaaatcggcaatatcacgtatcggcaattccatagctatcattgaccaggtctcacccagtcataactagagtcagatacaagagcaatgcattaaatgtataacggcgttaacaataatcaaagaccgacagatgtaatgaataagaagaagacggattgaaccaggccgtgtacacaaagcccgaaaagcgaaggagaagaaggtaaacataaagaaaagcgaagtgaagggtaagagggcaaaaaagaagaaacacaacccgcgtgtgtactgtacagggtcccagaatccggaccatgcctggccaccaaaagccatcattcctgtccaagacgttatgaataggatccaactctagaccaaccattcccctaggaagggcagcttgcgcatccccgaaatcatagaccgtagctccaaagacatgcatgacaagtaggaaggaatcggaaattccgactagctaccgtgtagctaccgtgtagcttcggccttacttcttgcggttagctcggcgggcagcgagatcgccctcagcgagccacttgctggcgttcaccatctggacgacgttgacgaactgcttgaacgccatgatggggaacgagatgccggtgatgatccacggccaggtgctctcgagcttgttcgcacgcgccatctcgagggctccggcgctccaggggctagcgaagaggctagctggttcggggtgcgcggggcttccaggctgggcggaggacagctgggaatcggagatgggctgcaggagcgaaggggagagggttggcgaggagaaggacaggaggtacaggccgatgaagaaggcttcattggcggtacagcagatgaacagaacgagctaacaaaacattgcgaataagcttggggacggaatatcagttcactgcggggccttaccttgctggtgtagtactggtacataatccagctacggctaggatcgaccttcttgtggctctggctagctccgcccatgcttagagtagcgtacatgtgcatgtagtggctagccatgtccaagctgatcagaccctggaaaatgatggcccatcggggccaggcggagctcaggaagactaggagacacgcagtggtgcagcggtcggtcaccatgtccagcaccgcaccgaaagtggtggattggttgaagtatcgtgctgcataaccgtccaggccgtccagcagacaggacaccgtgtagaggaaggagcaggtccgggggtggaggggcatgtagtatagcgaggcgaaggtcaaaaagacccgggaatatcctgggaacgtgttaaaccagatgccaacgtcaggcttaaagccacatcagcggggcattctaccgataagattcggagtgaagaggaagatattttccttgcgttccttggtttcttcccgtgcggatgcgccctctgaaggtgacacggagctattgcctgcatcttcgctctcctcggcgagggaggccttttgtcgtcgtgttgcgctcattgtgatgtgaaagggatgtgactggcgagcggtttctcgtataggtcgggggacgtatggataccggacagttggtctaagcgctgtcagcgtcgggtaatcaagaagcaaagacagaaacgcaccgagataagaatacagcgaattccgtcaggataaggataggaggtggtccaggtgggaaggagaatttcaacgataagggaagataagcgcgctttgttaacacgcactcgaaacttccaagggtcgatgaaagagggaaaagatgaaaaggtaggggatgaaagaggaagctggaaagatggaggaaaggaaattgtggaatgtctgcgggttactcggaaccgtggacttgagctttccccacgcggtccacttggaggtgatcgtgatcttgagagataaaaaccggactggacttgaaacatcccatatgtgggtgcaacatgtcaagtctcaaaaactgaagatgtttgtgatacttgatatagacccttggagacagcctgtttcatatatttaggtgtttcagatattgtgcgacctattataatcttgtaaaacatgcttttatagacatcatttgattatatatgaccagcctacaggcctagaagatatgtacagaacagaacccaaaatatacaagaaactcattcacgtccgtgacctgcgcggatcagtggcatcctgttcgcgccactcgcgagactccttagtacccatgctgccaacgccgccctcgagacgacgctcccagccaccaaggcgaacaacaagacaagtagcattgtcaccttccttggagacctcggtcgaaaaattgaccacatcgcgcgcgccctgctccggcgtgttggattccttgacgatatcaacgatctcctggtcaagcagtgtcccgctgatgccatcggataccaaaaccaagaacgagaactcggccgggccaagctctatgcgcgtgagttcaggctcggcagagactccgatgcgcttggagtggacatcgccgaaagcgcgcgtgttggctagcccgctcatgcgttcttcgccgaaagagtccgttacaaagcttgtggcataccgtctgagtcgggttgcctcgactggggaggaggggtggtggtttgatgtaacggggatggctataccggtttctgttgagcagaggagtatacgggtgtcgccaacatgagcaactagaaggcttgatggggcgatggggtgccagaacggggttggggtcggggtcgagatcatggcgatgcttccggtgctgccacccttgaaccgagcgcttccgccgatctgcggagatcgggtcatgctgggcctgtggaagatctcatcttcgttcagaggtcgctcggctcgaacgggatcgtcttctcgcttagctgcttgagcgttgacaaagtctagatccgctcgcaggaaggcgtactccacaacttcctcgatggagatgtggttcttaataatcgggtcgtcggactcggtgccattgtaggcgaaatgcggcggctggaacctcttgaagtagccaccaactacccgtctccaggtctgcacaaggtgtttctctagggctccgattcggcgacggtcaccctcttgcatcacaggtagttcgctagtggtgggtggcacttcggcaccaggtcgtagactggaccgaaggtcgatatcaaatgccgcgttctggatatactcgtgaaggtaatccctcaagaacgaactgcattcggatccgccatggccatcaaagataccgaagtagaagacttgtggatctccgctagcggtttccgcaccgcgcgactcccggggttcggccagaggatcatttttgttaggtcgcctaatcgatagcgaagttggaggtcgcttcgcaaaggcggggatgtcaatgactcccgcttggtacgtgtcttcattcgaagggcgggttccgcgggaggtgacggcgccgaaatggtgcttcgcgttgcggagtggaatgcggacgactgttgtctcccggtctattaaagcttggaaggcagctggcgatcgtggtgtgtctccggtgtgaggtatagaggcggagcgaggaagtttgtggaatggtgaggccggaccacgggggtccggatgaagcgaagacgacggcagatgggtgacaaagtaatcacgaaactgtggttgtcgtctaactgccgactgaccaggcggcacagactcggtactgtagcatcgcgctcgacgaaggagagcgaagcctgggttgtgttagctaggtgcttccaagatctaaggatcctcggagttaagcagtgtagctctggtcgcacatactgtaacagtcggccgaggtccagacccggcctgttactcgcctcgctgaaaggagaatcattggcccatcgaagtataaaaaatagcagtgaggaaaagagggttgaaaaggactggtgcgtggggagaacacatatggcccgagcgtcggcagataagaaggattcggaccggcacattctttccgtgggattagcttcattgctccactcgctatatatacatcatttacctagaagagagcatatacaatccaccgacctaatacaaggtgtttacacaggggataatgggccactaatcaagccaatacatgaatcctacaaagaccttctaaaatgcgaaagagttgcatgaacacatgaagtaccaagaagtggatatcgttcttcatgggctccacttatactacgtggactacaagcagggcagagtattgaatatttcacgcaaatcgatttgaaaactgaaaaacagggccaccaggcgctaatacacagctaaaaccgaccatgtcggtatgtagcaggtcatccaagatccacggaagtggatcagaaagaagcacgggtggccaaacaagaaaaaacgaaaaacaacgctgagagagtggcacctaccgggtagcagggccgtccattaagtccacggaagacagggggatctgccttcagaaattccgggttagatttcgagaaaaaaaacacgggatgtactcgggagagttttagatggccctagttcgagagaaaagactgctgtaaactgcatccacgacgggttgggcggtgcacatctttccaccgaagtatcgaccattgaggcccttgatggcgttctcgccaccttggacgcggtcgaacttcagatagatatctccgacggaattgggatctagtgaaatgtgaacaacgtggccgtatttcttctcacactccgttcggacgtcctcttcgaggtccttgacccaggttggactgtgctctctgtaaagaagtcagcgttcattctctcatgatggcgtcaaggaaacttacagcgcggggtcaaacatgttgcgcagcaaaacacagcgactagccatgttgacattgatgggaagcggcttagtttcggtcttgggtcggaggaatttctgacggtcgtcaacagaagactggggttcgtcggttcgtgcaagctttctcatcaaagcatccctagagtagttgttgaagtttacgccagcaacatctgtgtcgtcaagtgcactagcaccggcacccttttcagtttctctgccgccagcacggtcaaagttgttggagcctccggcttgaacgccacgacctccctggccggagaacgaagaaccctggaagtttgtagaagcacctgaggcgcgattggcgtgcgagtcgggggtgaacttatcattgccgagaccaacccgaatatttcgtccagcaaggtcaaagccgttcatcttttccaaagcgttccgagcttgatcggggtgggcaaatctggtcaagtcagttaatggaagtgtcaataacatggacggacaacgtactgaacgaatgcatatcccttgcttctaccactctcgtccgtttgcagctgaacgaactcgaggtcgccaaatggttcgaagacattggtgatatccttctcggtaatgctgaagtgaacattaccgacataaagtctgtggaagggtgcggtgtggtggtttcctgctggagcctccgggtttcgggctgcctggcggttcttttccgcttcagtcagttgggcaatgacgggaattcctgcgagcatctggccggtgagtcggatggcggcggagacagactcctcgtttttgaactcgacataaccgacactatacaaaatatgagaaagtgctttaaccaagtaatcatgtgaatacataccctttggagcgaccgttaacacgatcccggacgatttgagcatccttaacggggccggccttttcaaagaaggcaatcaaatccttgattctcaggcgggcagcaagttgctgcacaaagacagtgcgactgtcacgttcatcctcgttcagttctggagacttgcggctggcggcggatccacggcgaacatcagcatcacggcgggggcgtcgttcttcctcacgctggcggcgattgggccggtagtggcgatcgtcatagggagaacgggagcgggaacgaacgcgacctccaccacggtagaagtcaccgttggagcggtagccgtcacggtcacggcgagaacggcgtctctcagattcgcgactcttgctcctctttcggcttctaaggcttccattagcactaacagtgtcgctcttggcgacttcgtctccctgaaggtcacggtcagggcggcggtcacggctgtggtcgcggcgacgacgtctgtcgcgggaacgatcacggcgctcggtggggtccgcgcgggaatccgaagtggcgggggcctcgacgggggcctcgatgggggcggccgcagtagactcaaggagagcctctacgtcaagtccagacatcttgggaggtagcctgttgttgatcagggtagaaatgatcggggtggggatatcactttgtaggggtcagatcgcgtacggggacgcagagttggtattcgaaccctgattatgggatcagagtgaggtctccttggggtttgaccctttttacacgctttgggactcttgttcttgatgaaagtcacgccagaaacgcgacaaaagatgatgggggcttgaagcactgggggtgatggtatagtataaataaatttggttggccgggacctcgggaggcacaaagagggtcgaggcggtgaaaagaagagaagagtcacgtgggatctgagatttctcgccgccttatatatcaaggcggtctggtttctgcctgaggcataagattacgcgttgaacttggaaccttaaaaatgtcagtatacttctatggatacaagcaatacgtttgacagcgcggaagaatctgccttttatttcctttgccccttgatatctgtcggatccacgctctaaagtgtcacttttctttcatctacatctctatgattgtgaaaattgcccacttgtttgcctaagtaggcaaaagttcacccaagtaactattacaaacgacttctgacacgtagtagatactatatagatatagatattattttcttgcattatgattaacggtcatatacactgataagtgatgcttgttttaaaaaaaaggaatcaactccgcttgcaactagcatcatcacaagatatgacatgacaaagtctccccctgagaccaaccagaaactccacactagccaatatacttgaggagtaccgaagagtagtgactcgatcgtactcggcgttaaatcgtgacttgaggactagtgacagccccatattaatgctgtgatttcttgggctcactgagccttgacgcccttcggggcgggagacaccaactcggtgccaaagactcgatcccagaatcggctggtcacgccaaagccattctcgtaatcggcaaaatggtgctgaaggtggtacttcttgagctccttgtagtatgaaggaagactatatggatgttagcatggtttcattgtatcaaagatggagttcaacttacctgcggtggtgcaggaaataatgggtgagatcatagcaaatatacccgaagatgccgccggagaataccgacgtagccgcataccagttgtaatagaatactgcgtgtgccagcttccagaaaggagcggctagtaccacgaatagtgtcggtggcataacgagacgatacttgtccatcgggagatagtggtggataccgtggagcaggaagtgcagggtaataccgacacggttatccggaagatagtggtcaatgtggaagaggaatcggtgcaacagatactcgatcagagtccagaggcacacgccaacggtgaagtaggaggcagcaacgacggagttacccagcccgatagcccccactgttattccgtaggcaacacatggcaaccaaatagttggcacgatgtaccatgcggttttgctgagaggctccaggaagttgccgaacaaaggagcggactcccctccccggtagtgacgaggccgatgaatctgctccaagtagaactccttggagaagttgctgtaccacagctgcagcagaagcggcttgtttaagtccaggaacttatgggttttgtagtcctggctatagtcggtgtctatcgacaggtcctcctcccgagacattccagtagttgtgtaaatgggtccggactcggtttcggtcaccgtttcgatgacagtggtcgtggttgtcgtggttttgccaggtgtcgagacatcggagacaaagccaatgtggcactcatccaaaatttcataggcagcgtcgctgtgctcgtgggagacctcatctttcaggatatccgtcacatcctgcccggcatactccaggatcagatcgccaccaccggggtgcgcgtcgaggaaatcggtgacatcgtaaacgttacgccccacggtgatgtagcatgacttgtcggtgttgtgggattggacgtcggcggaggtcaacgttggcagaactctcccaggcatgttggcggaaatgcaagagaaacaaaataggggaaataggggaaaggaaatagccttggaatagtaggtagaatgggagatgaaaatccgaaaggcggcgaataataagaattaatcaggggaggcgtggcgtgacaccagaagccgagaaccagggatccgcctgctcccggagccttggaaattttcgaatgctcaacttgccattggatcaggcaacaaggttggacagggtccacatcggacttcgatcaatagcctattagaaagtaactccttatttaattcgacacaaaaaatatgcaaggtacgcttacagatgtagttttgtacatctccccatctcatgtcggtggggctgttatatcttagccgccttggagaggcgcgtgagggacctcgggaggaatcgcggtctagccttagctcagctgttaagcttctactctctaacttgcttttcaggcagcttatgatcaaggcggccgagtgcactagacagtagatcggcaagatggttatataagacaggagttgctgggacatgccaagaaagatgagacacgaagccggaaccatagaaatatatcgcctttttctgaagccgaagcattctgatctatcatatctgtgaagacaatggcaaaagcaagccaaatcggttggatagccagtggatgtaaggatcgtgtcttgatgctaatatttttaaagacaaaggactgtagaatatgtacggagtacctagtcaaggatgacaccttgtgctgagacaggagtttgacaaccgtcggaatttataagaagcttacattacctctgccttttcctaacagcctgatgttcccagatcaagtattttcgacagatgtgggagtccctacacgcgtgggcaattttaattaggtttttaaatatggttggttgaaaggcatcataagatttggatgaacctagaatcattatatatacttcgtaccaacgaggcagaaagagaccaagaagatgtatctttggattaataggaaggccaagttggtggatcagcaaggagaaaaaggaagtctagttaggaatggataaaaggagagattaacgtactagtcaccatatggacgtagcatgttctatatttgtacttgatggtcttccagctgtactccgtacatggacaacgatgacttccgtctaaccagatatagttagtacgtcaccacataggctatacctagataggaatagtcagcgccgctatccccaaacaggctagagttatcagttaaactgcgaaaccgctcaggctaagctgctagctcctttgacgagattctcagcaatcctccctaactccgaggcttggggactcagactggatttccgtttgccacccggttgatcggtctaatataaacacgaaaatcagcagccagaccccatattgaccccattaatggagacgatccccataagcacatcggcctgacaggaacagaaagtacctctcgaaacaaaccccgagatcctccagagggaaaggatctgtcaaattgaccaaaggcctatacgaagtacagcatactagtacacatccagtacatgctccgtactctattcagtgggcagtctctgtacgcgcccggctctcggccgggctaagtctccactgagagtctagcgttatcccgcggggctatggccggaacgataacttacaacgctattatgggctatttatcggcctctgcatggtcaattccaattttgaatcagggattatacctcgcactaattagtagtggagatttcagcccctcttccttcccacattctctaacttcttttttcttgtctctcttgtacttgtaatcttccctgtcctcatacgatatacccttctacgctccctctccctccaccgcccacaatgtcgaccgcagagaactggtcccccgagaacccaatcctggcctacctgcagacattagtgactaccaaaaagactcttccttatgggcagcccgtcgtcgtccacgcctctgtcagtcacatcaactccgcttcattgctgcggctggccgcagagatcggcccgcacatcgccatactacaaattccagccgatgtcatcgacgactggtccagcgacaccattgaacaacttcagtacctgtccaagaaacatagatttctactgtgggaaggaagcaagattctgaacccgttggtaaattttatgggcagagcggacgcgccgttggaaacgagacaggctttggccgactttatcaagaagtcatacaccagtggcccattgagaacggcgacatggtccaatctggccacctcgtgggcccccgcagctccagtggaccaacaggaaaacgatgtactgatccctaccttgcgattggcggctcgcgaggccgttgcgacaactgcgaagataatccaaaccgagatctctgccgagatgaataactactcgtcgggcgaggaggtagagatcatcatcccctccacggaaacaagcaacggttggaaagaattcagtccgaataatacgggatcgtccttacggaaatcgtcaaccatctcggtcaccaccgagtccgtgactctgcacgcgcaattccacgcagatgacggtgtcccaactcccccgcaactggcccgcagcgttgcactgtgtctacccggtaccattgacaccgcatttacccccgatttccgccaaagtacgataatcgccgcatgtgccaactccgactttgtcatcggattcgcaacgaacgagccctttttcgtcaatcaccgaggaaccgatatctttgaattggccttattcgacggcaacggaaatccccaagcaggtatcgacgctgcgaaactcgccaccttgccttatctcaacgaaaatgggaaatcgctcggtgtattctctcttgtatcacccactcttagcctcggctttgagtttgatcctgctttcaagcctaatggaagtgaatcatctgcccctggcaatgaaactccatacaaggtgcaatacctataccatgcaatcgggcaagcggtagccctccgggaaaagaacaaacaagaacaagaagcctccggtcttccagagagaacaccggtgggccccaaaatcatgcatattccagtggttattattgtataatgacagacagatagcgcttgttgttctgcatactcgctggccgttggcgagttttaatggcctcattcaagatcggcacctttggacttgagtatgtatgctatacgcccatcttgttttactttttgcgacctgccaatattttcaagcctcactcgtgtcggtacctacaccaaaagtgtctttacatataccaatgaatttgatgaacagataaatggctggcctaacttgtgctcgaatgtaaaatcccgaggtccattgtgaagataaatttaggccttaattatcaggctacaggcacgtgccatttcttagtcatattgtaggaatcgcctccagggctccaccctggccaaggtgggcatggagatcaacagtgaaagtgctttcagctctatagacattctactctatcttctctcgggtcctctatgcattaatgttcgtctttttccttataaagctgatcatggaatcaaattagtatttggttgccaaacagttgacctaattgacatcgaacaccaaccgccatcttcatgaacccattccgaaactcgaaaatactttgctatgacagtacataagacacctcgctggacagaatccccttgattatttacatccaatgtttgcctccacagccacagtttctcgccatatcatacccacagagaccttcgggaaactcgacagccatgaacccagccaaaaccccaggccatcaaagtgggctttctggtcaaaatgaccttcaacagaatggcgaagaaccgccaattacagttatcgccgcgaatggggacctaattctcgagtacatcgctcccggcgactcttcgtcgtcacccaccaagcgcaaatggcaggtggcaagcgagcgtcttacctcccacagtccatatttccaagcactactggatcccaccaagttctccgagggaagacagttcaatgcccagaagcaagcctggaatgaatcccagacaccagacccagcctcacagcatgcgctaccaacggtcaggcttcctaacgtccgctctaccagcatgtgcggagaagatgccattgagttatttttgaagattctttgccttgattctttggatgaaaacgaaagagctgtgtttgaaaatgagttgaagacccagtctacatcgcttgttgcgagaatgatcgaccttgccgattcattgaattctcctcgtgttgttcaggatgttctgcagaggattggatatttatatggaaagtcaaagactgcgctccttgccaggtttaattcagctttgttatcaatgaaggaagatcggattcgacagatcatcttcatatccgccttcctcgatgattcacgactcactagaatcatgacccacgccttgctggttgtgggctccagattctggataaatgggctagttgcccctgaagaagaatctttgcgctggagatatttaccaaatgggttagaaggtgggtttccattaatcccaactagtttccgttagctaaatcatctttctgcagaggaaatctattgccgacgtcaatatgttttgaacaccatcaccgatctacaggctcatttccttcgagtctacgggggtctggaggaaaccgacagtgcaaggtccgcagcaaacaacagaacattgggcagggcattcaccgcgtctgcacatacgctttttcaatctcgtcaattccaatgccgaggcggattcaacaacgccagccagtgcgacctcttccaactcggccagatgatccgatttttctcactgcgcgccagaacgatcttcctaggatcgacattgatagacccggatttcgactcagctccccacgacgatggtcacacagctggcgaatctaggaacgaccaacctccaggcccaccatctgatatcacagccatcatcgcctctatcaaacaatatcctgattatacaatcgacgaagcgcacaccggctgcggtnnnnnnnnnnnnnnnnnnnnnnnnnnnnnnnnnnnnnnnnnnnnnnnnnnnnnnnnnnnnnnnnnnnnnnnnnnnnnnnnnnnnnnnnnnnnnnnnnnnnnnnnnnnnnnnnnnnnnnnnnnnnnnnnnnnnnnnnnnnnnnnnnnnnnnnnnnnnnnnnnnnnnnnnnnnnnnnnnnnnnnnnnnnnnnnnnnnnnnnnnnnnnnnnncggctgcggtgtgcgtcgtcgcattatgcctgctttagagtgcatcgaaaaattcgtcttggatgaccgcggtctccttggtatcacccccgcagtctcggatactgctgtttcagacccatctcgaccctcaaaatggacgctttggtcagacttcacgcgcaagaaacacacagtcgacatttcttttgcgagagtcacggctgtatactacccttcggcgccgtcgaaaaatcaagccacccgctccactcaagaagaacttggacggctgttgtttactgctgctcggagggattggagtgcggcgggctcagcctgatgcttcgtacatgaataattaaactatttataccacaattcagaaacgccgggtgatccctgcgtatcgtcctaggccgatttaaaacttcatggtatagcctactttattatgacttgtgaaattctagagaaacggtggagcttgtcattgccaaactctagaagtctgacaataaatggtccgcattagattatgtcctgatcataagcgagtcaacccccaactaggtcatcaagtggagtttagcctgtaattgagtattgctcttcaattgaggaaagactgccagagatagctctatatatgattatatgatcaatgtatagcgcctagaggcaagtctgctcgttagcgcagattatttcctatgttaacacacagtagacataaacaagagagagcacatgcccagttgccaagttgggaattctaggtaccacgtcacaatgattgaaaacccaccatgacgaaatccgtcgccccctaacggcgtgtccggaaatacgacagaatgatccaagagaattagaagagaagaaacagtttcggccggtctagacttcgtgttttcgatctaggggtgcattccggctggctccagcatatacgtccagaccttgggagtacatgggactcgatgatctggttctgggagaagcttaaagttggaggttctgtggatgcgaggagtatatgtggactatggccttggattgtagtgatcgatgtatattagtgtacataacagaatatcgtatatgtttctttgatgccaatagacatggaatgaagcgtttaagtatcaatcaagacaatgtataccagcttccacaaaacaatgaactcgtgtatcgaattgtgacttgtagatggtctgggagaagttcagagaaacaagaatcacttttctctatagtgtctatatgaagacaggtgtggaattttctttcttttgatggcatgcaaatgaagcgacagaagaaaagaacccggatccagataactgcagagatatttttccaatttgattctgcgtcaattttgactttgatttttttctttttttttttttcgtatgtccattcatccacatagatatcaaccgttcaacataccggatcaccccagaagtaccccatgtcaagatccatgttcggaccagaggggaagaaagagcccgtgatctggccggtggctgggtcataggggaaacattcgtcatacgagctccgacccgagagatccttctcttgtttgatgaactgatcgagtagatccggcgcctcgagactgtaggattcagacaagccgagaggagtgttggattgatccatcgcggagcaggtgattgagtccagctcggcggagatagcatccaccgccactgctgcgggcatagtcgcggacggatcaaatgccacatcctcggctgctggctcttctgccatggcggagtttgcggtttcagggatatcgaagagggagtctgagtcttcggtgctggggaaatcattcacgttgattccgatatggggtgccaggcggcggaggaatccgtcgcaaagcttccaggctctttctgacgccatgttggtttttgatagtgtcgatagccagtccagggctttctttgcggctttggagaccatcgtctctttctccgggacatgctgcgcccggaatgccagctcgagtaggagaacagtaaccgcctgcatcagataatgtaatgtgcaccaccatggcgacatgcggtatagtagaactgcatcgggggtgtccgggaatagtgtaagcatgtggcatgcagcctcgacacattccgccgcggtcttgttgcagaactcgtaagtcttgtcctcctccgaggggggttgatctaagcgacagaggcacggccgggtgattccgattttggtgctgtaaaatagaaaggcgaggcccattcgctggctgatagggcattgggatgtctgtgtcgaggtgaaatcgtatgcagcaggaagattcatgaaccatgaatcaatctcaagcatcaggctcttgatggtaaactcggtgcttgcccatggagactgcagcgcttctgggctgtagagtttcactgtcacccgcttggaaatgctcgtcaaggaggccagctgcaagaagtaaagtgaagtgcaaggcggaagactcttgagatactcagctctgctcaattttttgtcgccctcagcaggaaaatcatttgaatcagaatcagccgcagattctaggtcctctgcgctgctgttggtgggcatacgctcggaaccactggatgtacggaatacagccgtgcctatcagccgagccacttcgtctttttggaaatcactctcgtcaaaaggaacaggcattggtgtggtgcaggagctgtcaatgatacacgagggacgcccagtcatgatagtaagtagatgatccagcgtatacaatgaccaccataccctgtagcgtatctctttggaagtgtctgatatgctcgtaccaacgttgcgcaagtgcaatccaagagccagcgctcctcgaactgcacttccagagagtttccaggccctgcaagagccgatattatgagtatataattgggatttgcaggcttggcaacttaccgattgatatgtcccgaggccactagatagaatgaagtaagcccctcgacttgcaattgctgtaggtcaggatgatggagaatttgatcttccaagctcaaggcccgcgcccttgaaaagtacatttggtggtcatcatcctcttccttcgcgtccgagttcgtcagctgcttatatttagccgcaatggcaaagatcaggttgagtatagcgagccacttgtttcctggcttgagagaaggttgactgaaaaagacctggaattgggggacaaaggttgaaaccccaatgattgggaaggatggatgcactgaagtcagataggcattgagcattttgcctgccatttcccgggatgggactccatacatatcactttggtctgcagtcggaatgtctagatcatcaagataatagttggaagccactacccatggctcgcttagattctccggtcgaggcgttagagttggagagggcagaccgttatcgtcatctgtgttgggaagagttgacggccaggcctcaaattcactgttgatctctttgctaagcctttggagccaagtaatctcagagctttttccaatgaaacccgttgctcgtgcagtttcatctctgttgaagtcctcctctgtttggtcgccacattcaagaggactaacagatgatgcgcgggagggtggtggctcagaacccgcatgccatgagatccttcgttctccagcggctgcaaggcatgtttccgggttgaatgccaagtcaggggccgattcctgggttggtattagacacagtcatcggatgtggatcaaacttcataccgctgccagggcaatgttcacgagttgctcatcagacacgccaaaacgattgctcagcttgctaatgacatcttcatatgcctgcacctttgcggataagcttgccaactgtcttttgtttttagtagatcatagacgtcagctcttgtaatgacggtgcactatatattggcccataccgcttggacttttcccgcttgccatcggtatagcagcagatgattccagcctctcgacagttgcggcatccggacttgtctccggtgcactttgtcttccgttgtctgcaagactcgcatgctcgacgaacgtgtcgacggtgaaacctgccaggagaggtgaaggcagattcggctccttccgctagtcgcgggatagccattttcttgccaacttcagattcaccttggagatgagagactgggttatcctatagatgctttatcagatcatactccttagcttagatcatgatttcacacttaccacactggaaaactgattacacgtgtctgcatcagtgcatgataatttgaagaggctctgttgctcattccatgagggaaatggaatattactcatggtgaaccatataaagattgaagctgtccactgagtgtcagtagaattcgcaactacatcttcctctttacttacttggatgaataaaggacaatgtctgggtcccaagagattttgatatatattgaaatgacaatatcaggaattgaccaatgggctgcagtgacatctgtcaaatcaaatagtcacaatgtgaagacgagaaggaaggttggattttataaaacaccccaggatctgacccacgagaaacatagactggggaaggacaaaggagaagaaaggttcgggttttcgggcaccgttgggaatcttaagctggtcaagctagatagatactctgtgatgacatgccatgctcgtttagggtaagccaacggcgcattattggctaccagtccaccgaattagggatagttgatttgcctcaagtgtccttgtagggcatggggcgaataggtcaacgttttcatgagcaaaataccttcttttggttattgaccacactatttgccatcaaccaaacattcttactccagagagagcctgaggtattggcttaaccatcagactacctcccccggtgatccattgttgagggtcagctttcggttgttagtaccgactagctctggagtccgatgtagtgaccaaggatcggatgaaagaggatgtaagctacttatacagagtcaacaacgccttcaacctcaggctgttcttcaattgaagttgtatgtagccaattccacgtaaaacatggaacatacagcattgaggcttagaaagggatatatagaccagtagtaaatagtaaacacctagtaaataacatccaggcccagacctcttcgaagtcaatctgacgtctggtggcgccacatttgacgttggttcgtccctggttggcattcaggccaggacacattcggaaagggaagagaaagcttgacggcaattctcaccatgtcttgtgtgtacgtaccccgtctttttgctctgcgagataatcctgacgtcccattacgtgatgattataaccttcaaatagggccttgtttgtcaggcaaccctaacaatttagaaaatgaactacagttatggatgttctgagcttatattaataaaagttaaaaaggaattggcttaacacgatcttggaagtaaagaacacgatccgaacatcattaggaactctatacagtagtccaggcccatttttactcaatgaggaagttgtctgcaacactgcgaacttccttcgagaatgcaacaccctcaccctccatatccagtagggaaacattgttgatgtcgacatccacgaaaggcttggtcttcgtgaagtggacactcatcgggaagaattcattctcgtcagcatcaatcgcctcgaactcaaagctgccagaggcattcgactgatcaacagtgcccaggttccagtccagactgtcaccggagacctcgtagaccgcatcaaagctagatacagcaggctcggtcgtgccatatggaatagtgacgaccacatcgcggagactatcgtcgcccgtgagctcatactccacagtcaccgtggtggagtcagagcccttgtttacccaaacggtgaatgtgattggaagaatatcggcattatcagccgaactggcaacacgccaccggagaactccgatggagttgttggcagggaagcgcttggtagtgtccttcagttggatgaccgaagagttggtgaagagagctttgtcgacattagggtgagtgcggaactgtgcgccatgtgtgggaatagcctggcagtcgagtcggagtttggtgagtgagggatcactgatacggagttgcatgtcacccttgacctcgaaagatttcaaggctccctcccgagtaagtgtggctgagatggtctcggcgattgtgagttggatgggctcccgatccgcctggagagactcgcgggctgagggaatgtcatgcactggagccgaagctcgtgcagccaccaatgggctctcctcctcaatttcgggccccatatcaccccggaccttctcgtagatatccgttgcctttgatttcttgcccagttgcatgcccttgccgcgtgtgggaatgggcctagtgatcacgcagtcagcagtagtttcgcaacggtgaaattagaaaaccaaacgtacttggaaaaggactgtttcttttcggcctcgtatgaatcatagctgtcaggcacggaggggcgcgctgggggtgtgtagacggggtaggttggggttcttggggcggcggcgcgacctgtgcgagcagcctctttgcgttgcatttccagctgcttcgcctttctcttgcgctcctcgctggcctccagctctttgttctatcaatgtatgttagccatgaactaatttcactggtgattccacatacccgctcaatgatttcctggattctctcctcatgactctccatttccaggaaggtcttgatctgagtgagagaaaggttctcccggtatcccatagttaccaattcatcaaacgcactcaggagctcaaaggcattgcgaagaatctcccgctcgtctaggctcttgcagatgctggtagtgacttgcgcaaagagatggagactgtcgatgtcttggagaatgttcgattgacggttggtgatcagcacgatatacaactcatccaatggttggtacacgaagcgcacgttgtcttgctcgacagtagtatgctgggttccggagtctgccagcttagggaaggaggcgagaagggcttcaattcgggagcgggagatctctcggaactggcgcgagagaaccgctttacctccacgggtgcatatcgacgctgcgagaacaacctgttgtgtgttgattagtccaattccccgcggattagattaaaacaaggacttaccatggtgaaaaacagcacagagggagcacacaaatgacaggaaaagagtgatcaaagaaaagagtacagaaagtgatagagaagcgtagggttgactggaagcgtaggccctgatgttggttggcggcggtagggagctactctgttcacttcggcgacggttggcccgtgcattcacttcgcttagtcgtcgaccagatactttctttctctcttcacttcatcttttcccgcgcgttgaattccccaccaacactcagttcatcatctctcttgctattactcgtaatctttcactctgcgtatcgccgaggaaacttttctctttcactctcaaaccccacttcaaccgcgttcatggaacgtcattgctgaagtttccaatacgaccccagatctcattttcacgcgtttacttgctatgacaacagctcccttgatcgcctaccccacaatggaagctcccgctacgggtgattctatggagatggcctcgccctaccaagggccggctgacgatttcgatatcgacatcgacctcatggaggaccatgtctcgaacatggatagcgatatgatgggcgcagaggaatttacaaatacttctcagcctactgaactcaacaatgatgcgatctacgatgccgacatggccgatgaaccctccgaagggtcgatgatcgacgctgacaactacgccgatgaagacaacgatattgacgtgcaatttgaggaagagccatatgaggaagaaatgattgaagccgatcaggtggaggatgttaatattgccacccctatcattcatcttgaacctgccggccgcaatgaagatgctgccagccccattaaggaggatatcacagtcacatccgtggaacttctcgaagcagcacctcaagaattaagcgactctgcgggacttgccccagtttcagacaaagcccaggtttctgaagttgaaggccaagacacccagacccacctgagcacggctgttgatgaccttactgaggaaccatccggaaatgccatcagtaccgaaacccgcggccataatgaaaaggcagagcttggtgaagaggctaacgagacatcaaagtctcctttgacagaggctgaggtaacgcaagttcccaacgaagacccggagaccagccaaatcaaaccttccgccgaatattcccacgatgacgctgcgcacccagaggcgcagcctgtgtctgaggaaaatcaccaggttgcagatgaagaacactcgccccaacaggtcacatacatggatgaacctcttcatcccgtcaaaattctctaccaggattgcgagatcgccctgtttcctcccctcgagggagactcgtcggatacattcttcattgaagatgaagctttagcttacgacaacgttgatcaaatcttcaaggctctacgccaggtgcttcaaaaaaccatggcaggcaatgaggttttggtcatcgatattgacactctcggtatccaaataacagaggtaagtactctcttaattatcctcctggcaaacgtactgactcatcctatcaggactcgatccatacatcccaggtaaccttgcatcagattctagatctttacctcagactttgtcgtaacgatggcactaccgatcccgaagccctctaccttacactgagcaccaagcgtgcgttcccggccgagatcgcagatctcaatgacgctgcaatggaaggcaagaaactttctgaacttcattccgaacttcaatcttgggatgaatatgatgaaggcgagccaggttccgagggggatcttgttgctcatggggctgaggagcatgaagatgaactctactacaccaatgaggcccaaaaagagctatcaactacggaagtgcaaacggctccagcacctggagaagatcaggcgttagatggcgaacatcctcaggtccagcccgaagctgtctctggtgctcaatcagagattgtgcatgcgcaggacgaggatagatctacctccagggagcggagtgccgaggccgcacgtgagcctgaatctcatccagcccagcccgagaacacagagccagatcaccttgatgtgtctcgccatctcgaaacagaccaagatcaggaatacgatcatggcgatggcgatgtcaacgaagagaactatgattccgagggccggcagagtgattctactgccacgttagctgcactgcctggcgcaagcgagattcaagagcataccgagcatgcccctttggacgtttctgtgaacgccgtcacagatgaaaacgacaatgatcactattacggagagaatgccgagaacgatgatctgggagatgacgaatattatgaggatgacccggtcgaagatttagaggctttccaaaatgatatcactggcagtgaaaatgctgatgatgctcaagaaccagccgatcaggcgcctgtctttgatgaagaggacacagatgagttagatgccccgccgacagacgaagttgtctcggaaactaccttgcgtgatgaatccaagcacttttcccatgaccagccggcaccgccccttgacagcggcttgcatgacacctctgacaagaaggagaaaacaccagagcctgcagatgatttacttggaatcgctgtagacctgatgcagactcccccgagagatacagagaacgatgcccttgatcactttgagggcatagactacgacgagccagaggatgaactggatgcccctgttgcagctgatgatgggggtgccaatcacgagtttgacgagaaccattttggcgactatgacacccattttgaagagtcggaggctgtagagttggttggaacagatccttcctcgacagacgccgaaacccacccgaactcgtcttctaaacggtcccgcgaagatgaagatgactgggacttggtggaaagcaccattgacaccaaacgtcgccgctcttcgtaaactatgctcccattttttttttctttactcctggagatttctccaatctttcttcgtcatgcctggtgtccagcgagtctgacctttgatgacttgttccacgcgacccataaccctccgacatactgttaaccatacttgccagcaacgacctcaaccgatggacgcagtgtctcgtctcactactaaccaaaacaggtatgtcgacccctttccccagtacgcgcagcgcacgccttcaactttctcggggtatgcgctttctctttttttcatcccgcatctgaatcaaaccccggtgccctcaactcgagacatcattcaattgcccgtgatctcttcctgcgtttctttcttttttgtcctttgactctttccccattgcgattcaagataccactgccggtcttcggccaaaatctttgctttcggtgttcatggatgcccgtttgggctgcgtgcttttcgatgcatttccttagggtctggcgtatcggcgcgatgggctagtccacgtggttgtagtattctaccaatgaattttacccacatcttttagttctcaggcgtctcaacttgtaaatctcaagtataaattaagaggaatctaaatgtccgatctcttacccccagatttgaattagctaatttcgcttatttagttatggggcccaaatgagaaacattccggggagagcgggtcggcatagtgtagaatagatgtacatgtatgttttgcaggtataaggaactatagtctatatgtacgatgtagattgtacgctattgtacgttagtactcgatgcggatggtttatttttacattcaattctatattgattcagccacgcaagacgatgtcatgctatggatctaaactggagttctctagggattccaggctaagtatagaaacctacgccgcattcggcgggctgaaacgccggtcttggcctcatttcagggtccatatttaataaatacaaagatgcaaagatacgccgttgactagctactggactactgcttttacctctaggtagaacctggggacagagggtgacacatggtagtgttgtgtagataataatgcactaaatcgagtcgatatgtacaacatagttaatagtacggagttggggccacctatttcaatctacctcgatctctgcatattttatataaaactccagaatgcaaagggaaattaagattaaaaattacctaaagcactgcaacacggcacttgaaccttggaaagcctccctacgcctccccaagccctctagccctgttgttctcttacgcgtcccccgatcgggcttgaaacggaaccccaccgcacgcaggcacatctctggcttctggcttgcttggccatcacctcactatcttcttcacatcctccttactcatcagaaatctcgggctggctcgtttttctgttttgtccttattcgctccctttgcctccccctagtcccgagcctttagcctattaccacgaccccttccttcgctcacccgagtctctcgctcattccccgacgcattgccggcactggaggtctttcgacagtaggagctcccggctcctaagataggaatcactcaagatgcttccagataagtacgtcgcttccacccgccgaattggcccacgacggcaagcttgtcagttctaacatggttgcgcgctgcgccattatagatatgtcgggcttattttagccattgtatcgaccatggccatcggcaccagttttgtgatcaccaaaaaggttggtgtgcccatcctccagaaacggacgcttcgatcccgagtgcgcgagacaaacaccgcggcgattcggtccaaagcgatcatcatcggagcggagtcgctaatgcgtctgaatacagggcttgatgcacgcctccgaacgacatggatttgagggcgaaggtttctcatatttgaagagtcccgtgtggtggggtggtatagtgacacgtacggaaaccaatcgtcagattcgacaattcgccagatgctaacgggttcatagtggctcttggcgaagtcgcaaacttcgctgcctacgcttttgcgcctgccatcctggttacgcccttgggtgcgctgagtgttctcatcgggtagggatctcttcaacatcgtgcattcgcctcatagctgacatgacacaacacagtgcggtcttgagttcgtacttcctcaacgagatacttggtgtattaggaaaactaggctgtgcgctgtgcttgctgggatcggtcgtcatcgttctccatgcgcctccagacaagcaggtggagaccgtcgatgagattcttggatatgcggtccagccaggtacgaagacttgatcggtgtcgcccaaaaactaccgctgactttgcgactaggattccttctttactgtgtcgcagttgcgatcttctcgactctgatgatctaccgggttgcgccggtctatggcaagaagaacccgctcgtctacatctcgatttgctccactgttggatcggtctcggtcatgtcagtcaaggcctttggcattgcagtgaaattgaccattggcggcaacaaccaatttgtccacgcgtccacctacgtctttgccattgtaaccggattttgcattctgacgcagatgaactacttcaacaaggcattgaactctttctcgacttcgatgtgagtgcagacatcaagtaatatggagatgcgaggctaacatgattcttcaaacagcgtgaacccactttattatgtcaccttcacaaccgcgactctctgtgcctcgtttattctcttcaagggattcaacaccactgacgccgtcaacaccatatctttactctgtggattcctcatcatcttcaccggcgtgtacctcctgaacctctcacgacatgacccggatggacacagcatggtgaattcaaaacttgacgaggatggagtgccaacagacggtatgacgagtttccagacccgtcgctcaatgcagtcccgccgaagcgagtcgagtgcatatttcaatggcaccagcgaccgcgaaggcctcatacacgcatacgatgtggagaacgggatcggcatgaacaacttgaccgaagaaagtaatggggagccaggcccgactttcccgcggacggatacgcagactgcactgcacacgaagcggaacagtcagctctgatcgcggatgtctcaaggtcttccaatcctcgccttatatcgaggtctttgaaattattctccttcgtctttacacaatcgactgctagcaagcttcccttccacgggcttgatctccacttgtatttttactgttccccgaatatgccagagttgcattgaaactcgggcgaactcaggcactggacatgtctgtatgaacgactggatatgactctgggtttctctggatggttgggatttgatgtctttcttcttctagttccttttttttctttttttttttttctaccggtgatctggcgtgccgagaggcttgtatatagttcaagttggatttctgcagaatagactggcgacgtatctgggtggggctgggccgatgatgtatttgcaggtcagctgtttatggaacatgcccatccgagattcttgcttttgcaattccaagttcaacatctttaaactattgccggttcttggctacctttgcgaggggtctatagacgtcaaccttggaagggcagagtgatactcccctcgaacgcggggaactcgcgcgatgcccactttattgcgcaaagtggccatcgtcgccgcagtcgacggtctggtcctacatcctcatgccagcgggtcgcggcatacgggtagtaacaatgaggcgtcatccatccgcatcgactataagacaaacaaaatcacagcgttgcccgcttccggcccggagcccctcgatggaaaggacgccctagagctagaggcctacggtctcgtaggtatgttgacgaactgagtgaaaaccgaaatagaaactaaccgcaatgcgctactgccacaggtctcttatctgtcgcttcaagttcattcctcgtttccatcacacagcgccagcaagtagcgcagatccgaggccgcccgatctacaccgtaaccaacgtcgcgatcattccgatctcatcgcaagccgatgcttcccgcgcaatcacacaggccaggaaagaatcctcgcaacaggaagccaccattgaatcctccgatgaagaggacctgaccgataacgaatccgacagagccgatgcggaagcagagatcggcagcgcgcccgcatcgcccactcgcgatgcatctcgtgtccgcggcaccagcgtcggcagtatcgcagaagacgtgatagcgaaaaagttccgcttcggcaggtttgcggccgattggctatcgcgcaaagacctgggattgcccaggcccggaactcaggagcaggatgtgttggagtctcccgttgacgaagcctccactcctcctccttcgggtaatggcagtgaggtgaatctcgacgctgtggatgagtctctgtctgaagaggctggggctcagagcgagcctgatcggcctaaatctgaccaggctgcggaattgctgccgaaactgcttcgctatacgaaacttttgtttgcatcgcataattttttctttgcttatgattatgacctgacgcgctgtttacatgtgcaggaagctcggaaagatcagcttcccctatataaagctgtggatccattggtatgtgcgaactgagggcttgtagtatgtttgaagattggcgtgctgactcgttgacagtatttttggaatagacatttgatgacaaaattcattgaccatggggctcatggatttgttctcccgttggttcaaggctttgtcggccaacgagaattcacaatcgctggtgctgaaaagaaacaaacttcgaaggactcagcagaactcgcgaaaggccgaattctcggtgaaaaagacgaggccgaagctgtggagactgatgctagcaaacgtgattatctattgactatcgtttctcgacggtctgtcaagcgaccgggtcttcgttacctgcgccgtggtgtcgatgatgagggcaacacagccaacacagtcgaaaccgagcagattctctcggttccggattggaccccgtctcaccctgcctactcatatttgcaagtccggggttccgttcctctttatttctctcagtcgccatatgctttgaagccagttccagtgctccatcactctgcggaaacgaatcttctcgccttcactagacacttccgagagttcagtcgacgatatggaaatatccaggctgtctctcttattgataagctagccggtgaactgaagctaggagagcaatacgagcgatataccgaagccttcaatgccgccggtgggatcgatggtaaaccattgaaacttgaatggtttgacttccataacgagtgccggggcatgaagttcgaaaatgtatcacgactggtcgaccgactgaaagatacattgaatgagttcagctataccatcatcgcagacaacgatatcctgcagacccaaaagggcatcatcagaaccaattgcatggattgtctagaccgcactggtgttgcccagtgtgcattcggccaatgggctctcgagcgtcaattggaaaatgaaggcattgacattgacattggtggtgactcttccacccaatggttcaatacagtctgggcagacaacggggatgccatctccaagcaatattcatcaaccgcggcccttaagggagattacacccgtacacgcaagcgagactacagaggtgccctcaacgacttgggactgactctttcccgctactacaataacatcgtaaacgacttcttctctcaagcctgtatcgactacctcctaggcaacgtctcaacccaagtctttgacgagttcgccatccagctccagaccaccgatccaggaatctcagtccaaaagctccgccagaacgccattgacacaagctgcaagatcgttattagtagcccctctgaagaattcctaggtggctggaccatgctcacaccccgccaacctaacacccttcgcaccctaccattcgaagaatcagtccttctcctaaccgatgccgcagtctacagctgccgcttcgactgggagaccgacaaagtgttgtcctttgagcgtatcgccctctgctccatcgagcgcatccactacggtacatacgtcacatccatattgacagatagccaagccgacgaggcgaccaacgtcggtctcgtcatagtctaccgcgacggcgacacaaacaccctccgcgtgaacacccggtccctgcagagcgatgtcgatctcagcacgctagagactaccgccagcgccaacagtgaatgggacctcgtttcctggctgcggggtagcaagcgtgcgacgacacggtttgttgcattcaagggcctgccactgtcaagtccggtcgctagtccgcggcttgggcctactactggtactgttcgcgagattgatcgcattcgctcggtctgtttggatatcgagcgggcgatgtttgcgggtcagggtgataaggctgaggcggtctctgtggttgaacagtctgatattatctctttggcggatgcgagaaagaggactgggtggttggaatatctggtttatgaccttaagaagatggtttgggcgtgattgctcttgtgatatagaggtgagttgcgggatttctcttccgcctcttctcttacatggctttcactcccaggttattggatcttaggtcattaacatctctttaagtcttttgcatatattccttagcattatgttgatagtattggatgtgtcgtaactgtcaccgatctcgaaaacatatgatcaatagaacagacagtttggaactatttgcttagggatttgacagtaagagcacgttagtatagtatcttagagataggcactgaaattattactgttctacaatatatcacccgtgcactgcctggtcaacatgtcacattttggcggtgtcagcttcaacctcaacttcatccaacattctaaccatccactcccatttccaggctgaaattttgcacacacatatcatgtgaaatgcagactatcctttcttcgcatctccttcttggacttgaagtctacacctaaacggactgaccgcctaccgtcttcagcaatcctttttttctgcccgcagcacatacacccctcagtctgaggtcgtccccgacaactgatctgattccgaccttactgcgaaatctctttggccaattacttctcgtcttatttctggatctgccttagcggatcgcagatttcagtcttgtttctttgatctggggcaacgaagggggcccgttcccacattttcggcggggctcctgtgctactcgcactttcgacctacatctgtcgcatcgagtcttcacctaagacaagatgaattggcaacctcagcaagagccattgaggcagttggctcgctaccttcgcgattcgctcaatgggactaaccttccagcccgagcagaagcagaacaggtaccggcgttccctttttttttttttttggtcctattgagcttcctctcaactgcgatcgccaatacactaccccaagatggaaactaacgttggaatcttttgttaaatagatgcttgcacaagcgacctcttctcctgattacgtcaattacatcacctatatcttttccagtccgcaagctgcttccctggcgggaattaacgagaacgaatggcctaccgttcgattttccgccgccgtaaacgtcaagacgaagattgctcttgcttacagcacgatatccccccaaagcttggcatttatcaaatccgcggctctggttacactgcgcgacaccgaccacaatgtctcaaaagctgccggtaacattatcaccgcaatggtgcttcacggaggccttttggcctggcctgaaattgtcaatgagctgttgacgactgtcgctaattccaacggggatgtgcccatgtcggctagagaagctgcaatggatgcgttgtacaaggtctgtgaggacaaccgcaaggttctggaccgggactatcagggtcaacgtcctctggatattatcattcccagcttgctacaattcatttcggtcgacagttcgcgcattcagattgctgctctcaacgccatccatgttttcttgccattcaaacctcaggcattgatggactcgctcgaccagttcctttcgcaattgttcaggattgccggtgatgaaaataccagagtccggcaaatggtgtgtcagtcgttctcccaacttgtggagactgccccggaaaagttggccccgcatatggaaggattggtcaactacatcatcatgcagcagcaatcccaggatgacccagagcttgcacttgacgccgccgagttttggattggtgctggagagcaagagcaattgcaggccgaattggcgccatacatgcacaagattatcccggttcttcttcaaaacatgatctacgatgaggaggaggtggctcggttgatggacgagcaagacgatgccgacgccgaggaccgcgccgaggatctcaagccacagtttgccaaatcgaagggtgatcgtctaaacatgtccaagccaggtgaacaaccagaaggctctcgcatcatcgagcaacagacagacgatgaggacgacttaagtgaaggtgaaatcgaggactcggaattcggagatgacccctcgggtaactggactttgcgcaagtgctctgctgctgcgctcgatgttttctccaccgtttaccatggtcctgtctttgaaatccttctgccatatttgatggaaaccctgcgccatgagcagtggccgaatcgagaggccgctgttcttacattaggcgcagtcgccgatggctgtatggatgctatcactccccatctcccagaattggtcccttacctcatctcactcctcaatgatgaccagcctgttgtgcgacaaatcacttgctggtgcttggcccgttattccggttgggcagcccacctccgcgatccagcccagaaagcccaattcttcgagcccatgatggaaggtatacttcatcgcatgttggacaacaacaagaaggtccaagaagctgctgcatcggcatttgctagcctggaggagaagtcagaggataacctggcgccctactgtgagcccatcttgcgccagttcgtagcgtgcttcaataagtacaaggaccgaaacatgtatatcctttatgattgcgtgcagacgctcgccgagtgtgttatgaacgagctggcgaggccgcatctaatcgagatcttgatgcctgccctcatcggtcgctataactacatttctgatgattctcgagagctcttcccgttgcttgaatgcctcggatatatctctgcagcctatggcgatgcatttgcccaattcgcgccgcctctcttcggtcgctgcatgaagattatttacggaaacttgcaagcttctattcaaccgacacacgccgcggctgacgagcctgacaaggacttccttgttactagcattgatcttcttagtgcaatcattcaggccatcgacccacaaaagagcggcgagcttgtgagtacttcacagccgtctttcttcgaactcctccgctactgcatggaggatccaaactatgaagtccgtcaatcaacatatgctttgctgggagactgcgctattagcatcttccctcagttggagcccttccttcccacccttaccccagttttgatcaagcagcttgacttggatctgattcgcgatgatgatcgtcacacgggcttcagtgttttgaacaacgcgtgttggtcgtgcggcgagatcgccgtccatgagaatgccgcgcttgcgccctacgccgagcaactataccaagggctctttgcaattatcattaacgaggaaatcatcgattcggtgaacgagaacgccgcgatggcgctgggacgattgggattctgctgcgcggaccagattgcgccccatttgagcgagtgctctggacctttcctgaagtcaatggacaagattgatttcacgcgtgaaaaggcttccgccttcctcggattcaaccaggtggtgatgaagaatccgcaggccatggagtcgagcctcctcgactacttccaggctattgcctcgttccccgcccgctcactcgcacaggaagagtaccgggacatccaggtgtctttccaacaggtaaggttattttccctagttcagtcacatgccactaatcaagatgtacaaataggttcttcagggatataagaccttgatccctgacttcagcaacttccttggccagctccccccagccgtggcccagacactacgcaccgtataccaggtctaagtcgaacttggtgattctacttagatcttgaccgggatgtcgggttatgtccacttctgtctcgaatcgggcgcgattaggttagggaagagacacgagggatacccgggggattagtaaatagggggtcagcggccggaatttcacgttaatagaaagaggagggagaaagggggggcaaaatcatgggaaggagcatctgcgatttagctgtttttttacgttacatctcatgattgcaacaggggcacgcaagaccctttatgatttctatttcgttgactttgctttcttcttgattcttattttgcattctttgtgcatagacatcatcaaggcagggctggctcataggttgcttcatttttttttgcttttttgttttctcagcgctggtttgggggttttttgcgtggcatattcatatccccccctttagatagatacctagatagataggtcttcgtcgttaatgaagatctcaaacaattttctgagagtctggcatgtagagtttggcatgttgcagtatcctatagtttcggaagcatcttgttgagacgtttggcgctctcctaggtatcttttcccgctatacttaacatgctgtctcactgactagaataaatatccttcatgtagtaagacgtaaaattgctaacaagtatcattgtgattatcagggttgtccttgacggtgctaggttcgccatacccgttaatccagttagtatagacaaaccaaacattactactccagcaaactaaatatagtcagttacctagcattatttctacgttagcacttttacctgcctctagaacaaagctggacagtgccagcgaatatcacacctattccgtccacatatccccggcccccaggaaatcaagagcacgtaccaagatcgactcgctaaccttgaacagggagtggatggaaaaaaattaagatcagcaggaccctggcaatctccgaccagctgcaggtttatttttggctagacagcatgcacagctagttaaatacggagtaactagtcaagtactttgtagttacttgctattaataacctagtagatgtataccacatccagcatatacatcaccaaactgtaagaatagaatcaagaataaacaaccaagcatccaatagacctctgctgcccatacgattcccatcaagccctaagtcccaaccaaacccaccacgaatccttcattccttcatagcatagtaagcagcaagataaccgtagcgaaaagataaataaaaagataaccagtaatatccaactcccggctctcgcctaactggcgcgttataattaactcggcagtcgaaaccaacaacaccctccccccgattggccgctcagacaaaaaccgcccgaaataccaagacgcgagcctttcccttaactactctttttcacgaactcggaaccgaccccaccttatctcaccctgggatttaaataggtgtcgatggcagaccgttgatgcagggtgcagggtgcaatctatgtatgtacctacaggtaccccgtagcataccgggcgtttggttcttagtgctgcgtagtgcgccattgccctgggccgtgtgttggtcttgttggtctgggctaactaattgactatgcctcttgcggcttgggatggtgtgatggaggctattgtggactggatttgggactgcttataggtccaggtgttgtgttgtgttggtgcgaaccgggctttctttggattatacttcgtacatattaatcctctcagggtcttgaaatgcgtttagtgtttacagttataggttttgactttgtcgggtattattttcagcctcagttgtaatattctcttggtatcttgtccacgtccggggtacgcttgcctcaactcagacctgagacctacctgcattatgcatattaggaaggttaacttccaaatgacgggaagctaagagttaaaccagatttattcccttctctaaatcacactttgagagaggcgaaacaagaaacaggaaataggaaacaggaaacaaacaccgcgcctgccactagaaacattccataaaattcagacggccatctacattcttgatacagtctgccagattcacctcactctcttgcacgtttccctggccatcatcgagttgcgcgtgcagaatgggattgttttcggggccctctagcttgaaatcaacgtcgcgtgcacattttgagaagtcgtgagcgccccaagccaatcgtcctattgattatatattagtattgaattagatatagataatagtatggtatggtctttcggacataagggaaacaccatgaacagaacgaacagagtttggatgatccttacccttatttaccccaatgaatccatccagatctagctctgaatatgtcgtttccccgcccggtttctggcagtaagcagtgaggatgtgcttatccttgacattgatgccatttgatgatttgtggaagcccatgctggaatggaatatagtaatagcgggtacaggttgataaatgcgacaggctgtggtatagtttgaaagtgaggctcattatatgcaggaatggcaggtatcagattattgcctctaatgacatcgatatggtgtcgatcctactgtggccatttggaatggcgaatgcgggtggctctgccatcatggttttctcattatgataggtacccggggtaaggggttgatagtataacagcgtaccccatgtcagagatgccgaggaacgattccttgctgggctactgctgtgtctaaaatagagtggtctttacccaagtggaaggtcataatgatctcatgcacacctgctgtcaacctcgcgttcacttgtagctgtcgggcattagtttctgtccggcaagaaggagcacagagatggtacgatggtggcttgggaacagagttgacgctaaggactctatttggttgggattttatatctccaggcttcgttacttcaaggttaccaagactgggaatcaagattgtcgatcttcacgtggtatgtctcctaaggatggagttttgggtttatattttatatttttatctccacttttacagcgaagaatgtagaaatatatttagttaatgcatctatcaacatgtacaagtacattctatgatccatagcccattcctccgttagatcagtattgtagattgatctatgatctacaagaaatcccagtcccaccagtccaggatagcccaagtcttggcagaatagagttggttagcgtgctgcactcccacgggctgtgtttctgggttagcggaactggggacttcatgattcaggtgatttcgctttttctggttggggcacttggattccaaggatcgcactcttctgatatcacggggatcgcaatgttggcaattccacagagggagagggtaagcgaagaggaaaaaaaaaagatttaaatatcccctcccgtcaattccgaaatctgacgcaaaacggttagcctaaaaagagaccaaatccataaatcaataaagctgatcaaatcaaagaaacccactcgggacttttggcccccaagctataccaaggttggcctgatgttgcgacaagcgagactgatcgctgctgattggatctatcgcattctgtgttccttcacatctgcggagaaattagcgtcgcccgaacatttccggtggcccgcacagcgatcgccattggatcttccgaaagcctggaaaggaaggcagcgtattcggctctgcactgtcaaaccagtcaaacaggggagattgaggatgatgatctaatctctgtacgactaactatggtgccacgtgtgagctaaataatcctttggagtaatcatcggcatggctgcagtacatcgtgaaatatagggaccggccccgtccagatcggaaggggcacacaccgactttagacattgacgtctgatccccagaaaacgtggctctgcggtgttctaaatatgcatacattgaacctctaggtcgggactgagtagatatacttagatttcttagatgctgactcggctagaatgatgctgttccaagcgacattcctaccgttttggactcagcccaagccctggaatgaatacattccattccatatatgtaccaggttctctttttatgatcatcctgaatactcccgcggaaccatctcatgaagtctctctcatccctgcacgccagggactagaccatcgggctcccaagacctattgcccacttcgggcttattgacgtatgctgtacactttcaggctcgtcagacatggttcccctacgttccagcccagtggtaacttcaccggagacggagatagggtggttccggcctggggcaacgatcgcaataggtcaatcagtctagggtgtcaggataagggatgcgcaaaaagaaaaatcaagaaaaattgagatgtgcggtgatcccgagagactggtcttacacccccctggtcggggactaaacgtacacctgttggttccaatccccaggttcccagtgtagagtttgtttcttttttcttttcttttcattttcacacaaatacctatattgtataactgttgtacagaatttccttccggtccactttcggttgtgatcaccgaggtcggcgtttaatcccccatctgactcatagactccgacggagtacggagtagaaacggccgacttccgcctgtcagctaagcttgacactttagcgagactcgcactgcatggggaatggcgtctacgatagcgcaaggattgactcccctcttttcctaacggggttaacggtgtcccttgacagcgacccacaatccagggtccgccagatccaaagccttgcgaggcaaaggggtcgatcggtagtacggagtatatttccctgcattgtgtattctatcatttgaaatctggggtctggtgtcataggcccctgcgtatatcctcttggctgggactctgttctctggaacgcgggatgggatttataaaaagaaaagtcaaaaacagacggatagatgcatcagcttgaagtcacccgtggaccttttcttatttgtaatcatctatgacctgcaatgctggatatggtatctgtaatctgtagaactagaaccttagtaactatccaaggctagacggttcctaccaacagctagttcggctaaagaaattataaataaaatacaaataaataaataaaaagaatatccacatggattgtgcaatgtcgaacctatccctgctctcccatgcgcctagtggatagcctagcctatagggccgctatataagctacccatgtggcccacccgacatgactgagtgctatattagacggtccgttttagggttttcttttcttttcttttcttttcctgaggtatttcctattttattttctattttcacttacgtaggcatttttgattattctatttattccttctgggcttactgcccctccccccctgtacccagaggctcaaaatctcgatcgtcagaaatgaaaaagaactagaaataattaggaaaataattcgagaatccgaaatttaaatccgtcagatcatatctcttgcgtaccctggactaatacaatttcttcccttctcctctacttcccccatctcccctcttaatcttcactttaagatctccagggctcgtattctccacgtgcttaattcaacttatcccccaaacctcaaccgcccccaaagttatttttggagaccctgttggactcttcccttcctctataactacagggcagacgtgcccatcaactcgttcgctacaacaccacctgtggagtccttgactccagtcccggttctcccccaagcaacaaggccaaaatggtcggtccaggtggcggtccaccgcgcaagagccacaccaagtcccgtaacggctgcaaaacgtgcaagagaagacacatccgatgcgacgagacctttccgcaatggtatgtgctgcaatccccaccagaatctccctactaatcccatccagccgcaattgcacaaagcacaactgccgctgcgactaccaggatacggttgcctcgcaagctgggagtccccccgccccgcgtcagggtcctgacctcctcatgtcgccagagatcgaaacgcaaatagacaattggcatcgcactggcgtgcctccgtatccggagctcttgcagtgtccgcgagctgggtggtcgggcttgtcgcgcactgatttgcgcttgattcactatataattggggcttctattgacttgcatcgtcgagggctaagtgggtgcacggtgtgggcgcagaagatgccgaagtgagtgctctttagcttggttggtggtctttgctgacgggtgcattctatagtttcctcgctattgcgcttggcagcgagttcgtcatgagctcgatattgagcttctcggcgtttaatcttgcttttcttacgcgagacccggagaccaaacagctggctttcagtcgtagactcacagctcttcaaggattgcaaactgctctagggtctttctcgaaggaaaactgtgatgcaattcttgcggcttctgtccttctatcatggcaggcgacagaccagtgagtgttatatgtaatctcccttggatcccgactaacaccaggtcagtcaaaattgggcatctttgcaacacggcatctccagcgtcctggaatccatgcatccatattggaagcaagagtcagatattgcacagtcgatagaaacccaacgaagaatgagcacagatctttcaatgcctggggtctacaaagcccccgacgaagacatgatacatttggatcaaactatccaggccctacgaatgacacagaaacgcgtttcccacaaccccgagcactttgaacgcctaggagacctcatcaaattcacccagaaattccgcaatgatttccctaaccaaacaaccgcacaagtattcgaaagcgtccaacccatccgccgctggttcttctggctcccagcatccatgctcggacgcggcgaatcagacatcagcgccctcccaatcctcgcccaattctttgccgtcggcatctctctcgacggctgcttcccagagatgggcggcgcatacctaggcgccttactcgtcggtcccatagaagagatctaccgcataatcgctacccaccacgccgcagaccccttcaaccccgatctgcgtctacccctagaactcatggatctgccccgcggaatcgtcgcccgccatcgcagccgctgcaacctcccctggtccccccgctcatccgtcgacccttactctccgggcccacccagcccttttcaccataatctgcacgagtactcgctcgtcgcctcctcctcctcgcctgcttccgcctccacttcttacgccgcgtataccccacctttgcattcccctcctgccgtcactattgccaattctacctttcccgtccaagacggttatgcctccgcaacccccattccacattctctatacccgccctccccgcattctctgtacccgccctccccacagctcatcgatagccaggaccccaacctcggtctctcggatatgggtcatagcaacgcccatcatccttcgatccctcatccagcggcttacaccccaccgtatggcgacgggctgtgcgccagcttaccgcgcacagacggcacactcggtctcaatatggaggtctatccacagccacacccgtttgaaatgccgggcttggctgcgcccacttcactttggacctgattgtctgctgtgctgagtttatttatacggaaagaaaagaaaaaatatggaaattctggactaccactctgaacagagttggtcagtcagattctggctattgaataccagggaattcgaagatataatgtctctcatttttgaaaatatgaagtctacggaattatgttctacgggaattggacctgcagaacatgtgatttaccttggatcattatacgagtgtttcgtttcacgacctgactacctatattcggaccttgttttgttgagcatgagcgttaatgtgtgatcttgtctctgattttatcggtttggtttttatacccggttacaattgcaaactgagggaattgtcccaacctggtattttgattgatatatatatgtagggtattgatatatgtactccactatgggtactgggcctgggcctgggactgtcgttggctgttgaaagacgcgaactagtcttactcggagttctcaatctggatatcaccgcatgaaggagcgattgaagtacccaatcttgcaaatccgggattttcgagccgacagctcccaacagctgccttacccctctatgtggaagtcgtctattatctttggagtattctagtacaatcatcattctcactcagtttctttggtattcgccatgtcatcgccagaaccttcgcaggctttcggcttatcacaaggcttcactacgaaactcgccatttccagtctcattctcttagtacagcgatctcccagcgcgggaaaaaagaaaatgacaatatctgacgccgattaggtcctctactggacctcaattgcattctacaatgtatatttccacccactagccaagattcccggtccgttgctcggacgcgcacctctagtatgtctcacctagtctatcctgcccgaattggacaataactgatccccaaaccagctatggcgagtcaaacactcaatgggaggaagattccacgtcgccatcgacaaagcacacaaaaaatacggtatacctaacccgagccctcacacaaaaaaaaaagaaacagcactaacaaatcccatcatcaggcgacatagtccgcgtctcaccgaacgaactctccttcgcctcagccgaatcctggaaatccatctacggccacccggtcgggggaacaatcacaatggtgaaaagcgagttctacgagatgttcggatcaggtttcgactcgctgtgtattgcctcagagcggaatccgcgcgttcattcccgtatgcggaaatctctgacgccggctttctcgacggaggctcttgtggagcaggagtctattgtgcagagttgtatagatgggtttattgagaaggtaggggaacgggggacgcgagaggaggggttggatttgagcaagtggtttgagatgttggcttttgatatcgttggtgagatggcttttggggagagttttcattgtattgagaatggtaggtcttgggtgattactgtatgagatgagatgttcaatggctaacgagttcaaggaaaacctcatcattggagtgagatggtgacatctcatgtctttatcgccaccctggtcgataatcttcgccgttatccgctctttaactatatcggggttttcattctccctaaactgacgttttcggtacggaatcggcattcgcagttcagtcgtgacaaagtcgcgcggtgagtccacattctctgttgagtgctcaagcacataggcttatttgaatacaggagacttgagagtcagtcatctcgaaaagacttcctcaccaatctcgtcgacaaggtgaagaacggcgaggttgggaaggaagaaatgactgcacatgcctctactctaatgttagcagagttctttcccttaccgtccatgaacctaattatattacagcatcgccggaggagagtcagtagcgaccttcctagccgctactacctattacgtccttaaaagcccatccgtgcatgcggagctgtgcaaggaaacccgcgacagcttcgacaacctatctgatatcaacgccacggctgcgcagcagctaccgtacctccaagccgttatctcagagagtctacgcatctacccgtctgcatcccagggctttccgcgtctgagtcccgaggcggaaatcggtggcgtgtatattccccgtggggtaagctaaataagtttattctgtcactgctggcccaaggataggagttatatgtatgctaatattcgatctcctcagacggaagtctacaccagcgcctggacagtcacccacgatccacgatacttccacgacccttatgtcttcaagccctcacgctggctcgatcccgcttgcactgatcttaaagaagctagccagccgttttcccttggtccgcgtggctgtctaggtcagaagtaagtttctactctattggatacctttcttcacttaagtattttgatggtaaatgtttactaatcgacattgcagttttgcatacgtggaaatgtgtagtattcttgctaaattgttttatacctttgatctggaattgctggactccggactagattgggaaaaggagagtaggatgcacgttatgtggtggaagccgtcgcttcctgtaaggttccgagctagggaaaaggtttcaaccaaggaaatgtgagcagaacgatagctctagtgatatttgtgcctgcagacaaacagcctccagagccagatagccacacaattccataggaatctacagattattcgattacttctgactggtataacgctgcattcgcattctccaagagaggcacagcaactctcacactatatatatgtctgtgacattgaacacaaggaactaaaattgatataactactgctatatgatctagcataactatcctacaaccttaaatagtatgttagtgcatcgtcttggcgcatcctttcaaactcaccctaatcctaatatggactggggatctgttgcagatcataagtttacccctgaatcccgatctgagattgtgcgactctgttacacccgccgatgcacactaagcatgtgatcggttacaagattcagagtgggctctattagggttcgggaagcgggaagcacggttagtagatttgggtttgatactgctccaccgagagatttgtagcacagggcagaggtagctgtgttacaattcctaccatccttgcaagcttctgagatatgatatgacggaataaactagttagttaggtaacgaactagtgagttatgatgagttatgagtcattatgagtggccagtgaagatcgcctgtgattggtcagacaagtatagtaggagaagtatacttcatgttcactatcctcttggagtaacttctgaagcactaaatagtgtcactgtgacaagcctgtgttttgagggctataccatcggaatgtcagaccaaggcgcagacccgagcgcgggctcttcctcccctgtgacgcctagtctgcagttaaaagaacccgagaaagagattctccagcgccaaatacacactccaaagtgccatatgagtcgcctaggccttttatatacatgtgcaactacttgtcctggccatcagctcaattgcagcgataattggatagatgggataaatcttctatttgcagcttgttacgaccccgagggtcacttgcacaactggcccgtatgggccgacgtacttgctaagtaagcgccaggggtatatacacaccgcgcacatgagatttagaaccttagcgattagtctactgaattgtataacccacgctagggacctccactctaattcaaacctccatttttaggatacactggtagctagtcctaacattctaatcgcttcatttttacgaattagaccactggaacccataagatacctcgaaatacccgtagcagaagccgggtgttatagggagatatacccctacctgccggttaagaaaaccaaacgtaggatttacaaacccctactgagataggggccatacctgccaaaagagccgctcctataaaagagggggctgcctaaccgataaaattggcaccagctttaagctgggatcttctgggctcgacaatttccctcaaagctcaccacgaatgtagagagtaaaattagataactagataaaggacttatattacttatataaggaagctagatatattataagaatttacctaaaagctaagtagctttagaagaataacttaaaggagctaaaaaaatagataaccctatactataggctataatagtactaggaataacccttagagagggttagtagaagggctaaagtatattagtatataatatacttatcttagatatttataagggtgccctaataggggttactagaattctaattaatagtagggctacctaaacctttattagctaaagataggtaaaggagaatctagaagatataaaaggaataccctacttagtaaaggcgattaataggtataaaatctacttatatagtagctgagagattactctttagcttatagatagtattagaagatatagtattataaagatatactataaggctatcgatatattaggatataatatagtcttagggatagactggctctatacagtaaatctagatatcgattagaatactagctattagttatactataagggtaccctattagaaatagagatagtctccctagaagagtttaagaaggaactatatctatatagtatcttttatatactttatattagactactagatctattagaagaaggtaaacggttaggagctatatagatagataacctcttactataagtatatagagactttgtagatatctttaataaggctctagcttcgatcctactagaatatactatatataattatactatcgatttagagctagggaaagtacccccgtttaggtcgctatacttactattaaacgtagagttagaagtcctatatacctatattaataagaaccttaagaggggctagatctaatatttaaagagtcctataggggtacctattctttttatactaaagaaggatagtaaacttcggctatatatagacttctatagattaaatataattactattaagaaccactactccttacctttaattagcgaatctctattaagacttactagtataaaggtctatattaagctagaccttagagatata

SEQ ID NO: 114 - DNA, 168627 bp, Penicillium roqueforti
  misc_feature (5048)..(5222): n is a, c, g, or t
  misc_feature (67666)..(67900): n is a, c, g, or t
  misc_feature (102406)..(102732): n is a, c, g, or t
  misc_feature (131709)..(131806): n is a, c, g, or t
  misc_feature (140187)..(140414): n is a, c, g, or t
  misc_feature (161899)..(166609): n is a, c, g, or t
cacaaaatacactcgccttaccaccgtttttccgtcagaaactttcctattgtctccgatcgccagtcttgttacatcagcagatggttgaaaattcttcccatatttgtacggaccaaatggcttccgtaaaaaggtattacctcctattatccaaggttgtatttttcatcactggcggttgtgtaaaagttgtcattgagtaggagtagtgatatagtctaaacatatatacaagaatcaaacgtctaccgtttgtaaagagagataagggattatagcgaacaaagagtatcaacttgaaataaaacaacgctatctatcactctgtcatctatcagtctatacatcaacttatcgctctggtaaattcaaccggaggtttaataaactgcatgaggccgctagtcctttcgcgatgtggcatagagaggaccagaaagtaataactcaaagtatggaggaactattaacggaatgtaaaagcattatggtactcaccatggtcaacagacgttcactatcggtcgtgtagctagctcaccgactatctccattaacacatatttgttgtaccataacactagaatatctttctcgcctactcaacatcctttgactctcaaaaatatcgctgctattcggatttcaggtagatttgatgaaatagagctcttatcagtgtcaaagtcgagaattttgagtgctgcttggtgatggtgctgttgtagcatataatcggtgtcatgtgcctcatacagagaccccgagggattttagggctcggcataggctacgtattccttttcacttatttctggcgagaaccttgcctggagttttatggttgcacaattttatggtcgtgataccaggtactagtaactagtaacccgggtgggtctttatcaaatgacagctggcgcgaaatcctggtcgtatctagggctcttctgttcaagggtagcagcataagagttgtgatcaacaagtgggggactgcaggagacgtgtgaaatattgtataatgatgtagccgtacgaccatgacgaagacttacgaaatgtctaaggaaatccgcaccatatattggcccgttaacatctttcaagttcggaattggaaatgcaattcacgctactggaaagcagagctgctcttgccagaacgaccagatcatcgcatgggcggtgcttccccgccaagaggggctgctactggaaattagcgcaatacgatatcgtgttagggaacttacatttctcagagacttgattgaacctgccgtctcggtagcggacaaaaatcccacagcagcggagtcgattggccatcgatccaaatcattcacgccaataatgcctttatctttgtcatatttctgcatgagccgcatcgtaataaacggaagggccgcaacatatgcggcttcggattgatctggtgtacaatctacacaaaagtccaaacacgctgtgaaatgtgagacagataacgcaaggatgggctaccaacaaacctatcttcaggatcccgtcaataccaagtaatatatcgtcacaggccagatattgatgtgcaaggccagataaagccaaatagcgggcaccgtcgagaatctaaaatgtcaggacaactctatcggacagccatgacggacaaacctggcatataatagatcccaattctgcctcgctgggatacacagatggaacggcaacaacatgcgcgagagtcagcggcaagtcgtcaaccaagaagaacgcgagatcatcgtgcatatagcattcatataaggagagaacgttcgtgtgttcgagacgtccgaatctatgaattaatctgcgagcagtttcttgcggatatgtccggattgctaccatgcgagatggacgggtgcggcgtgtggcgattgtgactttaccagcgatctgataggtaatgacttcccgataggtatcccacggcgactcctgtcttacaatcaagacagttgcaatgttttcgataccacacaagcggggcagacaaaggctcttaggaggccccgtgacaaccttcgatctactgcggcggcgaagtctgcttggcttcgtggtggtcgccatccggctttcgtaggtggtggagtttggcatcgagatagggggctgaaattgtgctttgatagtgccaaggtcacatatcatgttttctttgaatttgttggttgccatgataagataattatgatcgcatgaactttgagagaaagggatattccatcgcttttatatgcgaagtgttacggatgggactttcatcaatgataggagaccgtagcttcgcccgactatcatatgatgaggcttccatgccacggttgtcacctccagacagtcatcggcatatgtagcttgttatgactgatatctcagcctacataaaaatgagacccgagctaattgaagcgtaacatattggcctcccaactgcctcaggatattgttgctagtagcagctcattttgctatgagaacgttgttctcgaagagaatctagatttcatatgactggcagtgggaaggttaaaagaaaatgggagctactcgcttctttcccggtttttacatacacacacacacacaattcattaacgcccggcggctgagccgaaagggcaactatcgctaaactactatacatgtcatagtatatacaattctgtgactcattggagcccatacacaagaccttggcgtatttgtcattctcagcatgcagtgtcgcagcggatgctcgtgggttagtaagttggttagtagactggcttgaaggcgcttctccaagtgttcaacatcctatcttcggcagttgaagcgcgtccaccgtgaatagcacgaggtggttggtgggttagattagaatgaaagaggggtgatttatgttcgtcggcggggttaagtggcctcgaggcggcctgtggctatggcgaatcgtattgaggcccgtactgcctctaagtttggcgtccacttttgatcgtcggaaggcgacttccctcccaggtaaaagggcagatttcctcggtgagtgtcggtacattgtagcatatccgtccggtgtgtggtccacttccgacatcgaaagaggaagtgctccacagtttccttagcttgtccgcacgcacactgatccgtgtcggccgcgttgattcgatagaggtatccattcagtctcgccatgcccgtccggagttgggctagcacggtcgcttccttccatgacaagggatcatacagctgtcgcgtgtgttttcctgggagtgctgcatctactcgtttggcgtgctttccgacgtccgctggcagggtatttctggggactgcttgagaccgtgcgagattcagcgtggttgattttatcctcggggcgcgttcttgcaagagggcatcttcttgtgtcgcggctctagcctgttctttagccagacctagcagcttgttgtcttcactggcagaaacccagcggacttgaacatggtttccgtttctctgcaaccttttaatcaacttgtatatccgacacacgaactcctggccagattgttgtcgagggttcctgagtgtgagaaccgccgctttgttgcttgtgagcagtgcgatcgtgtagtctttcagtcccgtcgccgtgctcaatacatgtgccatggctgccagttccgcagagaatggattctgctctgcccttacagccaaggtgatggatagcgctttgtgtttaagcttccgattccgaggtggtcgcttctcgatggccactccaaaacccaccagctcgtttcgtgcagagctgctaaccgcgacctgcatgcacccgcccgcttcggccagggactcatgctgctcatcaatgtcggtttgtacgcgttccgcccacggggatagcgtgaaggggttgatcgtttctaatgtctccatgtcgatgtgcttgagcgtatcggctacgtgatacagtggtgagcggtggtatcttctgaactttctgatctgatctgtacaccggcgaagaggattggtttccggcaaggtgtggatgtctgtccacattttcacggctcgtttccaaaatcgacgttgtgcagtagccatgtgagcctccgcctctgcgacactagtcgcgactgtgagaaatgtccccacaatggcttgcgcgcctactctttggactcggttgatcggccccatggctttatccttgcacgcgtgcatccagacattggaggcgtagtccactactggtgctactgtcgatgcgaatagctgtcgcgcggttgctggggagaggcctcggagtcgccgaagctccatcgctgcttcgagacccttggacgctgctctcgcgatatgctccttgtacttaagtctcgtgtccatcaagacacccaggatcttaacgtggtctttgggtaccaccgtctgccccttgatggtgaatggctcatggtccaatttacgcatcttgggagcaaagtgtatgatagccgtcttgtcagcctcaaatgtcgctccgcttctcttttcccagttgagtgcctcgttgatgatggcttcaattccttcccggttactctgcgcagtcggaccggtcacccacgcggtaaaatcatccacgaaagcgactgctcctccctggctgtcgatctgtctttgcacgaggtctgcattgaaaaacagaaatagaatcggagacaggggcgagccctgcggcagcccagcttgtggcaagctttgagtctcagataactgcccgttgatcaggatatttgccgttcgttccgagcagaaggccccaacccaacgaagcaagacctccggtatgcctcgggctttcatcctctggatcagtcgttctttgcatactccgttgtaggctcccttgacatcgaagctaatcaagctcagcactcgtcggccgcgccacgccgcatagatctgctcctgcaggaacaccagtgcttgctctgcggaccgctgctttcgagccccaaagtggctcccccggcggnnnnnnnnnnnnnnnnnnnnnnnnnnnnnnnnnnnnnnnnnnnnnnnnnnnnnnnnnnnnnnnnnnnnnnnnnnnnnnnnnnnnnnnnnnnnnnnnnnnnnnnnnnnnnnnnnnnnnnnnnnnnnnnnnnnnnnnnnnnnnnnnnnnnnnnnnnnnnnnnnnnnnnnnnnnnnnncgcgcccaaagggggctcgtcgggagcagtccatgcgtctccaccgcgtgcgagatcctctctgcgatcaccgattcgagtatctttccgagtgtcgcaaggagtgagataggtctccatgcctttgcaatggtgtagtcatctttattcggcttcttgagcggtatgatcttggcctgtctccactgtcttggcagtgtgccctcttgcagcgaggcttgaaagaggtcgaggaccctgtgcttgactgagggccacgtcatcttccaaacgatcgccggtaggccgtcttcaccaggtgccttccacgacttggccgctgacagttgccgctctatctcctccatagtgacggctggcatgtccacaggcgctctttgtggtctcactccttcctcgtcgatgttctctggcaaaggcgggaaaaacttggatatcaattcctccgcttgctccttgtgatcgttcgtagtggttccatcggctctgaggagctgcggaatcttcccgaacgcggcattgtctcccgacttgaggtacttggcggctttccagatgttgtcgttgtctgcgagaaactcgttccagtgcttcttcttttgtttgcgaatggcatcgtggtattgtttggccgcatcctgggccatcgtttcgagccgggggacttttcgccccgcccgtcgctcggagcgagcacggtttctccagtgcgtatatatatgacggagttgagtgaggtcagctgtccaccatcgcttcgcatgtggtgatggtttcgccctcggggttaaagcgtgtaccgcttcggacactgccaacatgagtcgatccgttttctgctgtaccgtgccctccgacggaaggatggctagagcgttctgaatcctggcgttaatctccttccatggtgcattcttcagtaaaagtcgctcttggtgctttgggcccgaccactgggcgtcgaacacggactcaatggcgcagtgatcagagccgtggtctgtctcgagtaaagcacattttgtcatggagtccgtcagattttctgaagctaggacgagatcgatggtagactcgcagtctccactttgtccgccgccgtgccatgtcttggtgccgcgtttaagcaagctactgagcgcaaactcattcataaggtcaatgatcggatccgcttccccttgtcttcccagcgacacctcgtctccaccccagagttgatcgtgtcggttgaagtcccctaccatcagaatctccaccacggcgcctgtctctcgtcgtacttttgtgatcgcatcgtgtaaatgattgcacgcatcgtccaaggctgagatattgcctccttcaacgtaaaccgatgccataaagatcagtcgctcggggagcctgaccatcgctgctgtgatgtctggagactccacagggacttgctccgcttcgacttctttgttgacccagagcatgctccgaatcgcccatctcccctccctccaggtagagggcaccatctttgtccacttgtgatgccccattggagtggtcaagagccggccttgaatcctcctcgcttggggttcctggatcgctagcgccaccgcgttttgagtgtcttcgtcattcattaaactctcgtgcactgcaccctgcttcctcacgttcagctgaattattcgaagagaattattcatgacgtgatggatagagcttccggcagttcttgctgtacgattcgtgaggccctccgcacggtacacactttggaaccggttggatacagtcgctgtggcgatggccctctgtagcgcatttcgcgcatttctgggcgttcttgcactggaatgccttatggcctatctcttggcagttgtaacattgtgtcggtcgcggtcggtgttcgaagacactagtcacaccagattctccccccgcgtggaaaaatccgtcggccaagagccttcgcgcgtcgatgcgtttggtcaggtaaaccaccattgaaccgtaggccttctcgctctcttttctgctcagccatgaaatcttggctacgttggtctcattctcctcactaaacgctgctgcagcctcggttcggacctcaccgctctcgtctagcacggaggtcttgttgacgctatcgactttgatcgggtagagctcgtcacggaggacccgagctcccgccccgattttctgttctgcaacctttttgaccagctgctgttcatcctcatcccggcaggcgatcctgatccggttggcgtttttcgggtcaacggtaacagcgcgacagcgccagtgcgcgtggccctctgttaactgtatctctgcctcaaccgctgctctgaccgagcctgcggaggtcgattttgtccctttttctgccatcttcgaggtatctatcgtgcaaaatagcgtgtccgtaaaggtggtgggtgtcgtgttcagcgttaaaagggaccgtatgttgcttgggtaactggacggcggagtgcgcgcgacatctgcgtaggaaggagagcctgcaacagcgggaacactgatttcctcgcgtaaggactggatttcgcgcaggatcgcatcgtggttgttctgagagcacgtctcagagtggcattgcggtgtcgtgtttctattcgtcagggactgtagctcgtgtcggacctccgcgagggcggtaccgaactgttctctggttctctgaatttcttccttgtgtatttcgtcacggagtctgatctctcgcctgagtttggcgatctctctcaccaaaccgccgacgtcgagctcttcgcgctcggtcgcggcgtcgtccgaagttacctcgtcacgccggtctcctagctcaattctctccttttgctgggaacgcgtctttcgtcgatcagtgtcaatttcctgctcacgagcgtagttgttcggtggtcgagtggtgcgtttcggtctcgccagtcgcggtggcgaatcttcgcgttcgtcacagtcgggcggttcaggggttcgcatcgcggcccgtcccgccattggtcacagtaactcactagacgcgctcgaaatcctgatgaaagtaccgagagacaagctacagtacttcccgaaactgatacgtactacagtaccccccagaggtacaggatgggtttttacatacagggaggatcgaaatcagtttcaccagatgcacacagagattatttctcgaaccctgtcatgaaacacgctatacccgttacagctactatactcttgaacccctcacttggcagtattccagtacaggcgtaaataactgcttaaaaatagcttctgtattagacttgtaaggtcttcggggtttctagaactttggaatagcaaacttcccaaaaaaagattcccatctcgtccacatactggccgggcttttcgaggaggcgatcgcatagcgattctatcatcggaggtgttacgttcggtcgtcgacctactcgagctggggtgctctgacatttccgaatcggcgaaggttattactgattttgataattgaacgcttactacattcaacagcttgagctatttgcgaggtagtgagtgatttgcttaatattatacgctatatcatttcgagcttcgagagggagagtcttggcgccatgttggggaaatttagataactagtgaagcctggaaatttaatagtcagcaactccatcttctcacccttgctcacccctctgctcagtgagcaagggaaatgattcctggtgaaatgtctgggaaaggccaggtaataggaaatgcacgtgacctagtgaacttgtaggagcctggcagcacatctcaaagctgcggacctcagaaaagatgattaaacgaaatggcgcatcctccttcggttgatccagtacttctcagaatgtgcactttaattgctgaatcagtgacctccttgagcgatgagggacatatattttatccagaaaatgctggctgattatacgctcgatctgacttttgagatcgggtcgtcctgttcctgggaacgccattacccgccccaacgtggagggagatcgttgcaaaaccgggttgaaagcggtgtggcgagtagaaagcacacttaattcatcttgctgagcacgctagagtcacatgatgacaaggctgagaaaattcccctctttcagttcgttggacacggggcccactgagattctcgtcatgaaccacattacacaaaagctactactcaacgtcttctgctagacgagagagagagagtgtttgaaacattgcgcactatctcgtacgtccgggcattctggttagtcgagcttaccacccaccatggctgagagttccaaatctcagccagagcaatcagtgttaggacagaacaaagctggtaccgacacaccaccatgtcgaaagcgacttcaacatagtgcatatactattggatgggtgtgcgcccttgtaaaggagcaaaccgcagccagagctatgttagatgaagagcacgaacctctcccgatcccttcaaatgatcttaacacatatactcttggctctatacgtggccacaacatcgtcatagcctgcctgcccaatatggaagccaactctgccgcaaccgttgcgacctctatgataaacacttttcttacaatccggttcgggcttatggtagggattggcagcggaattccgtcaaaggtcaatctgggtgatgtggtggtcagccaaccggttgctgactattccggggtagtacaatacgatatggggaggttgggaaggggtgggcagtttgtccacacgggcttgctgaacagacctccaaacgcgctgctcaaagcgttgaaccggctgaaatctgatcatgagatttatggatcacaaatcaatgagtatctagatgatgtggaacggaaatacccgaaactggctccaaaatataccaggtgtgacgagaatggaaaatcatctgagaacgaaaaggagaaaaggaccgaaagagaagtcagggtgcattacggcctgatcgcatccgggaacaaagtggttaaggatgcgcaatcccgagactccctcgataaagcattcggcgggcacttgctatgcgtggagatggaggcagctgggctcatgaatgacttcccgtgtgttgttatacgagggatttgtgactatgcggacctgggaaaagaaaaaggttggcaagaatacgctgcaaccgtggctgctgcgtacgcaaaggaactgttaggatgtctgcatcccagtcttgttgatgccgaggatccaggaaaggctacactagaaaatggtaagtatatacctatccaaatagatcatgtgcaggtgtctaaagctggagtgccaacaaatacccaagacatatgaaacgaatttggaaatatattctgactgcaaatagtgagacaacagatcgaaagggtacagcagacagttatggactctggggactccgactcatccagtgacaacgactcactgttttctgctcctgtctctgtacctagcaccagatcgtttgactcgggaaaaggtgaaatgaattcgttgttgattgagcagtttgcacacttgctgaatgaagacggagatatgctttcgctacttttgatcggcttatcaagagaaccgatcggatttgagaggatgcgaaacaattttcggagactgctgaaacacttcgcgaatgacctcaaggcggatatccttagcgaatcgcaccgagacctagtgagatttgtaagctcatattcagttatgatcactcgtgagctctttgccatggtgtctgtcgacgagcagcgaaagctcaatccttacgaacgcctagcccacgagaggaaagtggaatcctatcttcaaagtctacaggacgccgctcttcagactagtgaagtaatcgaaggacttgatcctgatgatgaggacagtgacgaaggatccgtagcagagggagccaacgaggatgagccgtatgatggatctttgcaaaacctggatcaaatgaagcactttattcgggaaagcgctgcctaccaaattcttcgtcgtcggcttgaagagtttgttcaaccctcactaagctcacagtttcggaatttggtgatcaagtggtcaaaaccagaaaataagaaccatggcgatgttgctcggtataaactgcggaaccttgtcacagatttacagcacgtgaatccctctgagattcgattcgagcatgacgagagcagttctcgattttctatgttcatcagccaatatcagcatttaattgagcgctggaccggagagtcttgggactggtggccgttacctcgctatccgagaccactggccgaatcagagacacggttacggtggaagtgtgtgagtcatcaaattatagacagccctattcaatatagatacagccctaattcaccaaccaggtgtgtggcaaagagcgatgggcagagatgccaaacacccttgtcaaacgcttccagtctataatcagaaggcttcccgttgacagcttggtaacccaaattacgtcgcctcctccaacacacacttctaatccgaacccttgcaatattctaaacagcaatctaatttctaaccaaacttcccatcaagatcatatagtcgagcagccggacggttcaccctccaatccttcacttcgtcctcgaccctcgggactcaaggttaatatcgcggacttgagcatcactcggcaacgcgtcctctttctcgcaaagcaaggcggagattatagactagcacaaatttgcgttagcaatatgacctgtcataccttcttcagcacaatgaaaaaggagtattttcgcctgagaggtgtcttgcgaagctggttcagcgtttggagatactctcattgcgacttttacaaagtaagtactattgcctgtgatcgtaaggtattgttaaaaataaaaatcacagttcgagaagttcgatgaccatgagtttacggtcaggatcaaagattcattccctgaccatgcgaacaccgattacgagtatcaaccaagaccgatggacaacattccgcctatctcagagcacgaattcacgaaacgtttctacgcgtgtcacaaaccaagaccactacttcacctgcaccacgaatgtaggaaaccgggggcacattcctctgaaatcttgcagttcctcccaaagaaaagaactgaactagaagaagcaggcaacaagcgcgaagacttctgggggatttatgcgcgcgaaaaaatcagcttacgttggatcattctatacaattttggctgcgtttcacctttgctagcgttcttcctagcgtggattgtaccccatgggcttggcacagacttacaaaacccatctataccgctttccatgatgattgccatgctttctctgttttggagcttgtatcttagcagtctgcaattcggaaggtcgcattaatttgaatattttgtattcgatgagatattgcctagctcactcagaaagtccccgctctgagcaaagacggccttgcctgaacgtccatttaccgaccactcattagaaaattttgaaatttagagggaaaatccaccacatctgcggcaaccatatgagcatagcctcgtatattcttgaggccgacgagcaccgatcttgatcctgcggattataaccgatttttcaggcaattcctgcttatgccgtaatttcctagaataaacctgtatatatattgatttagtaccattcaagcgcagagcttagctcttaatcatggctatcctcacttaaaagagatcaaataaaacaatgacggaagtggtctactgtgcgagatatctttaggaatgagaggtgtagacttccgcaaaacccaactttcgacccagtttcgacccatctttattcgtaaatatacatacactcaatttaaaagcccgagacacgaataatacaatgtttcaatacaagtcagcatttgaaacgaggctaagcaagattaagattagcgtgtttaaaaggagggtttgagaaagaatccttgtgagcagatggtgaaactaatttcgatccatcctgtacattagaatgagtctagggtttctgcagtctgctttggtgtgtgtagctttcaggtttatatgtcagatcatagggtggcgcatgttcctgcttcctttatcttgagttatcaattgcgtgtgagctctctcgaaggagaaaattttccccatctcggtcggtttgcaagctccgaatttttgaaatgaatgtcttcacctcatcccgggcccttgagcgaagcttaaccacggtgtagagtagtgcctgacgtaatgccgacgactcgatgctgtaagatttgcgcctgcggtcactgctgggatcatatatgcattggcaaagttttgccttacagttcgcgcatggcagcgcaccagaacactgcatcatattagcactggaaggaggaaattcattagcttctaaccttggtccttttctggcgacaatttgtacaagcaagagagacattctgtcgctttccacacgatgaaggtgatgtctgtagttgggagagagaggcctgcaccatcgggcggagcggccgtagggcattttggcctgtcatactaggctaggaactgagggccaaatacgtcagaaaatattattcagtgcatatgctatcgtaaggaggtgggtgatgcgctggattaaatagccaattcgcagtgcccgttctctttgtttacgagatgaaaaaaacacattagcagctccgttaacacaaaggccgaaagctcacggtcattattgagaccagtcccatgcacattcccgagctcggctgtagcgattgaaatgtttatcaaacaaagaaacacggcggtactgattacattgagccctgcccccggcttggcacagatgcatgctttgattggacaacgcctggcagtaactgaatcacctcggtctattccaaagatatcacaccatcggtttgtcgtacagaaaatcatccatttcccttttggacttctgtgttacgttttacgacgtccgatgcaacgatgagaccgtatggctgctataacaatcagagttccgaagctgttgtccaggctagatataaacgaaattcctttgcaaagattagccagctattatgataatgaaggttacaaattaggtgtaactcaccattggaacttacgctatccaatctacactgatggactgcaatattccacctggcagtccttgcacaagtcgctactgtgggactttactccaactttgtgtgtagggatgacctagctggatttgagtccatttcctgatacaatgggccactcgatctgcatgcccctcattcaggataaggcaattgctccgacgcaggtgtatatcgctgatggtactgttacactctcgcatcatactgtgctgaatggtacaatgttataatgaatgcataagttgtgctggaccaaccgccagactcgcacaccgggtacgggatacaagaaacctattctgttgatattatattcgttcgtatagtcgcgagcttcgtcaggcttgtgaattgaaaagaagatcttatggtctccaaagcaagcacgacgatggagagaacagtacatcaaccaacgtttatgcggcttgcgccatattatgagctaggactgataacatgcaaggacgtgtggggcaatgtatatagcagttacgatttccactgcaacgatggttctcctttcctggggcacccaggcagcgacttcccgagaattacctaatgtgtatttaggtttctaagggtttgggatgaggcgtatacagccgccggcgagactttgttggttttagcggcgggtcgtcaccatttgacggctgttgatccatacattgcttgactttcgagatctcagcatctagcgacaagactttctagtttatcttaactgtttccaatcgatgatagatatggcctcggctcagccataagaattcgacccctcccgacctccacctctattgagttgctactttgcaatttcagtgatcttcctctaacgatatcttcctttacatagagcaattttctatatctaagaaacgggccaggactaccctcattagacaatccctcaccctcttcttgcaatttccgagattcctgacaggtgatgtctaacgggataatcccagtcagcaagtacgctagtaagtcgttcgcgagaagattccaatgcctgctcaaaaaagtgcagttgagattgctgcttgtcgtggagaatctgaaggctgtctctctcatgtttcaggtgcacaccagcctccttcaatatctgattgttttgctctagcttctctccatcgaagtgcttatacacgcacgactcccacacgcgtcgatagagcccaacaagtcgagctgctggaaaggtgaagttcgaattgtcacgttcgaggtctgctagcaccttcaatacgggttgaagaggttcggtcgccaagatacgtcttgtttctgcttcctgctgcgaaggggagagctgcaacagttagagatagcattccaagccactcgtgtcacgcactgatagatagacatgatcagaagcttcctgtgaattgcctttgtcattgagggttggcaattcactgatctgctgatctccctccttttcctggcttagcgagctgtttggggtatccattttgccctcgagacaaagcaaaggggctggacagtaccatttctctcaatccctggtgtctcttatagagtatgcagacggagtgactacgtgctgagttttacaatcaccacaatagtcaatcaacacagctggactttcactagaatgtattttatttttcaacaagctgtttacagtccatgcgaggattatgatattgatcaacgagttagtagtggtaatctgacgaaacctcatggccttgaaatccagattcatggactttatggactttggccaatttggtcagctatcaacggttgttaaacgccagtagagctatacgttgatcatatcacaatgggtcttttataggtatcattcaacgtctttatttactgtttgattaatcagtcaaaaaagaaatgataagtatacagatatcttcactgctgacatgggatgccattggagctagaagtgtttcactggttcattgatcaagaccatgatattgaaacccgacccttcttccccattcgttaaaagtacttgaaacccatccagcagataaaacatcatggaaataatagtgctactgtataaagatacgaacaactaaatttgaatgatgattatacgtttaagatactaagttgatgcacggctgagtttaacgtggttcgagcaagggcgggcacctgtaagcgacggtgacctaacgtgccgtaggtaaacggacaaatccacagctcaatacaaccaatagaaaaccgcggccgggaagactagcctgtgtctcctagtaaacaaatcggaggccggtttggtgattcgaagtgatagttgattgaacatcatggctgattgaatagccataacaccgcaaggcctcattttagagcgctataacgggttaataccagtcaacgttccttacaggaaccgactaagcatcactatccctcagcataacccttacttggctctttcgctaggcataaaacttggcatcaaaaatggcatcatgacagtcacaacaaatagtggctataagaataagatatgaatttcaacagaccctacatagaaaaggcaatgtgcccttaagagctctctaccaagcaaagcagtgaagtaataaggcaagccgagaagttctggatacgtcctctgccccgctctgcaatttattcacttgactacgccaaagtcaagcaggcttcgcatctgaattacttaataagttctcccttttaatccagagctgggatttccacttgactgacattcatggaatacagtgaggacagcatgttcgacagtgaccatgagagaagtgattcgtagtcgatccactgtaccaccaatgtcagccgatcaaagagatatgccttgccttggctggttagtgtccatgtaacctgtcgaagagccaccgttatttccctctctagatacgtccctaagggaaaagcgcgaatcatcatgttacgggaaaataaacctcagcccgatctatctgaaattctactgatcctagaggcgatgtgatttttcctggtccacgcggattcaacgacaatatacgagcgcaaaaaccacgaggctatttcccgtatcttcgtccctggtttatggcaggcatatacaacgcgcgctctattgcgtcttccgtcctcactctcaccgccctcacacaatgaacggcggagctgaacctcagaccgtccgcatcgcaaaacattcatccaccataggacaatttaactgtcacaactgggctggccacacttctactaagtcggtcaatcggccggtcacctagcctgcagatttcaagggacagccggagtttgcgatgagcttgtatacgatatggcacgaatgatgactactttgagatcttttcaaaagctatactaactcgtctactaggatcaatacttactgactaggatcctataacaaaagaacaccctcattattttgtcctcgagtcgaatgcgaagcgaacaaatgtcttgtctgctagagattccctataccaatacgatcgcggcccgcttcccatgctggaccgaatcgctgccgaattgatcgacggtcgagggactgcgaacctgggaccgcaacccttccagtcgatcctttgcctggttgtcattgtacggagggactggcttgctgcgcccaaccacctgcactgggaccggcgggggactgccgacctgcgattggagcttctctgattcgggactggattcctgctcactggatatatcgggtttggtatggtcatgccgtgccatatcgacatgccatcgatcgccgcggtctgcgtggcctgggaactgcttctctggtatcgtgcatcgactcatcactgaattcctccgtgctgggctcgctgctcgtgttagtggctcccatgtccgcgacaccgtcaccggacggactgcccatttcctcttcactggcctgccaattgggctgacacccatcacacatctgttcagccttcccatgatcaccgcaatggcttcgccggtaaccgtaccatctaaatacccatccaatatgtatcttcgacaccgcggatgctccgcctccatatactgctggatgcgtcgtaactcatcctcgcccgtatcttgcgtgatatattccggtgcttcggtatccgcgggctggatgatcatcgccttgctgctttgcccatcacggcccggacgaccactctcctgcgcgtaatctatcaacgtgcgcggctgcctaacatgaatgatacaacggatgtcgggaatatccacacccatacccaatgcattggtagctacgattacgggcgactgcccactctggaacgcatccaacaccgtggctttgtcgacctgccgactgtggtaaacccggcaccccaatcgactggccaatatctccccggttcggaccaccggcgtatacacaatgaccttaccgggtcgactccgatggatgcggtcctagataatggctaataccggtggcgcctcgacccaacagatctcaaatcgatattccagacctacgatccgacgtaccatgcggtatgccacattgctacggtacgtaccggtgcggaacaactgcactttctcgcgcgtggtctccatccgcataaacaccctgtccacttcacgcggcggcaaggtcgccgtgacataccatctgcacgccgaacccactcaatcgacccagctgggccatcaccgaccggaaatccttctggtcgttcaacatcacgtggtactcgttgatatcgattcgctccaaccggtgctgcatacgctaccggttcaaaaaacccagatgatagggttgtccgcggtaagacattgcactcatttctgacactttcatctctggactattcacgcaggatgtacggtatcgtcaagaacatggattcgaatataaaggcatcaaaccggcgatacaagttttttcccgggggagaccacgaccgtacatggcaataattccattctccatctcgggtaagtatacattacctagtagagccacggtccgattatagaatccataattgccctaacccgagaccgtttattttatttttcttgttgtcttatctttctagaatcaaaataagaagaaatggattagtccaaccttgtccgcgcggacgagattagactgaatcggaaaagcgtgcagcgctttgacccgctctgactttgaagacagtcaattgtgtgcggccaacgcaaccaacgggcaatggcggagacctatactgattggcgttttctagcaatagtagcatttgcattgcgcggcgttgcgtcctctctgtcggaaaacataatgtaggggggagaaatcaaaagttttcatgtataatttagatgaggatagcgattggctactcagctagaaatagtttcatgatccctgttagccgaacgatggtctctatatgaagccgtcaaatccctgagcgcgctgggggatggttgttcttctgtataaaaataggttgcgtttatgagagcgtagaacagacagccgttaatacccgctgattgggtacgaaattgcacatgcaaaacataatttattatagtctgaaataaatcatattggtatttttcgccacaaccactctgttgctgatcacttagtcatagaatggaccgctaggaattgttttctagaattcagccctggaaatctcgctactgattcggcgaagtcatatgcagggtcttcacggtgtatcccacctttgtaaaccccttactctgtgataccaacgaggtaaagatacatttctccatgatgcttttgagtcgtagaacaattctggtcgcggaaatccaagcatgcatatcataggaggctaggcaacatagttttgatctcacgtaatatcatatatcgatcaaattgcgggctggaagagacctaggtggcaacatataagtgtcatggcatgactgccttccaaggtccaaaatcttttcccatactcagctatgtcgactgcaagaaacaacgccggtacctctttcaagtaccactccattcccaagcggatcgatgcggccattgtccatattcctctcgaccgtctggaaaaactgtatcccgacattcaacgcttcgcagctatggctgtcgtgttttccttccaccccaagagcccactcacgccaagagttttattgatcaagcgaaacggcaacgaaggctcatggggtaatacctgggagccaggaggaggaactccagatgaagaggacccgactatcctccattccgcggcccgagaaagcatggaggagacgcaaatctggcctttaagatttgctagcaatgctttcacgtgttctttctatcacagagatagaaagaccggcaatcaagtcctcatgcgccctctcggattcatcgccatcgaccatgaagtgacgcgagacaacggagagacgatcaaaaacgaaaagacgatggcgcaacgaatctggtccagcgggattcaacagccgctcggccaaagttctgtcaagatcagtgatgagcaccttgatcattgctggttcactgaggacgaggttcgcagcgctgctccatacgagcaagacactccacagggtccatttgctatgcttacggccaaaagggacatggttctacttgcctttcagttgttcagtcaatcccaaggccatagtttgccaccttcaatagatatagcacgctaggacatggcggcaaaggggaacttggcaaattgaatgagtctcttaggagccctcaaatgatggccacacagagaaagttcggtactttatttttggagagcattagagcggtaaattaccgttagcaaggactattgcagagaaattcactgtcccgtttcggaggaacccttccgaactcaagcagctttccatgttatgtccgttaattgtctcacgtaactcggtaactcatacaaaatattattactccatttggtcatagagttttatctctcaagagagcccatcttggaagcaaacgaacatctcacagattagacaatacgtcctggccatatatgtatgcacaaagctacactaggttgcctttctgttcgaatatgctcgtttttatcatggtcaagtaattgctcttatgctatatgcccatccgcacagttttgccaacatggaatctatacttacctccattgaatgcagtgcgagagctagctatgtaccctgtcatatgagcatgcctcaagcccttgaacagtatttagaaagccgtagctctgtgcttaaatgataagtcgacagcaaaacggcagtcctagctgatatgtacagatactgcaaggtcaagagctaagtactctaggagcgggagcggctctcctggagcgaactgtggtacatgcttaccacacgccgcactaaaactttctgaaagctcttataaggtaccatggtccccacacaattcctataccgttcaatctttcaaattaacttattattactactctcaacggttgacgcgagaaagcaaacggtgcttatgcccgataggtcctcggaggaattcgatatctgcacggtcacgggagagcactcgctactttcagtgtcgatactattctacttacggaactcggtggcgtcagaattggtaagtagatatctgagtataactagcgggccatattagcatgagattctgatggttggccatatcgcagtgggagtggagcatagttgccaaatcaatgcagccgagatggacgcagccactacaaagctgttttccttggctgaggtggtggagaggctgatcatgaagaatcctctacgatatcatagagcaccgagaaaggtgtaattcaccggaaaagctgctacgcgtcagccttgacctgccagccttctacgtcatatactcatcaatcagagcaaattgttcgagtaatgaagagatgagagcgaaatgaagatactggtgaatgcgaccaacaaaattactcaccataatctagagtcatataatcgtggtgatgcgtaaatgcggcgagaatccgtatcgtttggctggtgagaagacacgattgaaggtactatacgttttagactgcagatggtacagaatttggaggtaatccgtagccccatttgagataaattgcaggggctttgaaatacagctgtatattgtattacactaacgaagtggttgtcactaaacacagagacaaaatggttgaagataatcggacatgggcaaatctcacccgctttgtccgtaggaagagctgccctcgcatatcgatttcccaccagagcactgtttgaccctcgcggtttggaagatcgatcttgacactagggtgttgaaggagctggttcaaaacagcaggtgactctttcaccacactgtaccacagagcactctcgccatttgtgttcctccaattcacgtgcaaatcttttttacgcaacaaaatattggtaaccagctccgagccataattcgcggccgtcatgagggagagaaaccatcgtgcagcgcattcacatcggcccggtaagaaagcaaggtctttgcaaagtcgcaattgttgtttagcggcccagtgaagcgcagagctgttttggtacctgatattatattcgatcagggctaggcgtagcttgggatagaggattgagtttgtccgagcaagagcagaaatgtcgcctccctctagggtgcttgctatgatccaaagggtttctgttgggcagtcgagaatggaaatctgctcaattttgtcaggattcggaaggctcatctcatttcggctgttcataccatgattttgggcgatggatttcagtggaaagggagacacaacgtgctgctcagatgcttcttatcggtttcaaggtgacggtaataaatggatgaaagtaatgtgactaagttaagcgtttttgaatcaagaacctggcaaaggcgagatacgtgggaggggagaagcttaaccaacacttgcggtcaccggccaagcatcagtttccccctacctgccgacgtagcaatcgactagcggtcctaggaacgctgcctaagtttcttggattgtgtctcggttctataaagaccaagtttatatgagatggactttatgagggtgcgagaattgggaatctacgacatataaaagaagatctagacttagcccagtaaaactgaaagaacagcaccaaatgacatgatctaggtactgtaacggttgccaatctactgaagaccaattagttgaaggtttcgtacagctgggataaaagctattggtacagagacctcggagcgtctcaaccatatcctccggcatgccagtcttcagaccccgacacagatcatatctctacacatcccgtttgcttcatgtatatccctaacagcagcggaggaaactcccaggatgaacaatgcacctcctaggatacgcttcttatttcctacatatcgagaaacttctctattagggcctgattatgttagtaggtcagcgacctcacattgtgccttttcggccagctggcgtatggtacagcccaagcaccaacgattcgtcacagctctacgaggaatcctcagcgctttaccatgatcttatcagaatagagtcggtaccgcggagaacattttgattgctcctagaacaagagaagcatatcctgggagcttgtcttggatccacaattcgactgtagcaaatgaagaatctggcggcatatttgatgtggaatgattgatgaggccagcagatatcataagtagtgttccttctccatctaaacccccactagtacacgtatcgctgtccgtgatttcgaacatacagccagtacactcaacctactttacagtacccactatcgcaccgctcacaagcaccgcggattatctaccatctgctgtttcactacttttgaatagtggctatacattttgtataagaggcctagatcaacagtgtgacttcttcaattcctccactatgtctcttcgcccctgtcagccatgccgcagatcaaagattcgatgcaaccgtgaagttcctcattgtcaagcttgcgtcaagcgtggtagatcctcgttgtgtgtctatgaaatgagagtgtcagaccaggaacctgctcttccagagcctcattcaaagcggcaaaagaaagagcatagacgagcatctggcgagtatcaatttgaatggagagcttttgagccaggatacgaacggtcttttcggtacgaaacgagtacgaatgagaagatacaacaaatcgagcctgaaaaggaagcaaatatcaatcacttgcatcaaagtcattttgacaggggcgatatgacaccacacgagacgtcaccaaagagtattacagctacaacagcggacaaggattgggtttctcggccagagtatcgtgtggcagctgtggatgatattctcgaacggccacagagaatattaacatatcaaccaacaccgcgttatgcggagatgacccctccggtaatcaattgcaatctacgaggaaatttgagaccacaaggctgactctcaaaaaggcttctttgccaccacggccgaattttgatatgacgatatctgaaagacacaataatgacctacatacaacccaccaactattgttggtattgagctacctttttatctcttcaatgcttcctacggatgtaggggctttgtggaaggtcatatgccgatacggccatgactgggaagagagcttcgtcttgcagcgcagtcagcttcaaagttggctggtcagtgcccgcaaaattttgaccaactccgacgggctacacactatatctttggaagacatagaactccaaataagatacattctgtttatccttgggcaggaggcatcgccccactcgagctttctagccgaatgcttccaaagcgagtaccctccataccggccgtttggggtgagggcaagcgtcgcgttgatttgtcatgcctttgagggcatccggaccgatgaacttgagggatatgaatcgaaggaaatttggtctcgcgaccagaactttctgtcagtgatggcttcccgtctcaaggagtcgccactgtttgggcctgaaatttcaatgccccatctaaagtctatgataataagtcttcagagggctttccagtgtgaagaaatccgcgtgtccagcatgaattgtcggactctgaggatccagagccagttcgaagtattggggtattatagacgggcattcctagcttttgacccgatgctattgccaaaaattatggcttcattgaccgaaactaatgatattactaacctatctggccagcaccagcttacaaatatggagaggagcttggacagaagtaagtaaatctctgtttagattgatatggtgtttgacaatagtatagccaatttggccttgcgtctggccaacattatcatatccctcacgacagagcgcttggacgcagctttccgagatatccgcgagattcaggagtcaaaagcggatcaagtcgttgccatggagatgatgcacgtaaagtcattcgaagaagcatgcaattcgaacaggatccgtaagtcttagtatttcgaattggaacaggagaaatccctaatcgttgcagaacccaccattgaacccaccattgtccgtgttttccatgtttgaccgtgaaattacgagcggatttcggaatccgagtatgtctcttctgaaaagtccgagcgttgtatactaagaaaattgaaaattttgtaattggaaagagtatggaagccctacgcgctggaaacgagatgatcaacatggtttctagagatcaaaatgcaattgtttctcagtataggactagatccgattcttgatctgcgccgatgaatccttaattcgttcacataagagtcctatggtcgcaaagagcctccagcattagcggcgtgatactgtgcggtcggcctgctccaatagagggggccctggtatcaccgaactgtcgcaggttgctgcggatggtggtgacggaacgcgggctgcattctgcggcagcagcgatctaggccgtagtcagtgatttgctcaagatcatatcgcggatgaattctcgggtagaggggggtagatttggagccatattgggtcgtaggtgttcgtctcgaggtggtgaggaagggggtcaaggtggtaagttgcgacagctgcgaatattgtctcattaacgcttcggtgtattggtcttgtcaggtactttaggtttctattctaacgatctgcagtctagctagattgagactaggcagtttcaccatcgacctggcgttagggtctgggaaagttcctctatgtaatatggagtgtggcttcgaaggatgtctgaaagccatggacacggctggcaatccaaccccctaaggaatacagacagagtttgccttggtcatttgcggtacctcgcttttttctactcgaacatattctttgctactgatcgaaaactactgaactactgtaccgcacacttccataggaggacaaattcccgtgttttctgctgtttctgttaagcttactttattttttttgccagctagcttagggtctgcttccaatcatagggcaacccttactgttcgttgaaccaaggcagccgatgaagaatagatttcgaactgtgaaatgcaaccaatcatgctagtgagtaggtaactaacatgactcaagtagatattttctatgggcgtaaaacacagatgctgttggtgttcagtggtttttatgttcaatgttgacataaacgttgacatcaactttctaacaccaatcaccacccgtacatcgccaaagatggttatctgagaatactcagtgaatgtatcagcacgatactaccaatctatcggggacgaggccaaaggccccggtgctcctggaagcacaagcaagactccgccagccatctttcctactgtagcttgtcgcgcggctgaatcacccgcaatggcaacccccgagatatcggaaatgcacctacctcatgtttctattcatgaccaacccaaatctggcccccaaattgctcccgggaatgcgctttaaatcaattcgtgaatcaggcagcacgtggatactgtaactggattgaatcatcgttgattcaaatgacgcattggtctacgtaccgtggttgaggcaacaaatcaacatccgcagtcctcctgggagccggcactgattggtaacccgcgaaaacttgatagtggggatatctttcatggtggacatcaaacatagaaaagctcacgattatcctatggtggatgctattatgccttctttgctccaacaagttgctagggctgcgcatcatggatcacgagctgtcacacgtatcaaagaggtccaataccccagacacagaagaacataatggacttacatggcaaaccggtatcgttatcttagatccctttcttgaggaatccatcggctgacaatccatctccatggaggcaatgaatcggctgaaaacttccgtcaggtcgtcgaccagattgtccacggaaattgcgaccacacacgccaggttttacagccgtcttttaaccagtccactggctctatatccacagaggtagccacttctgttgctagctcgaggggctgtatgataccccaaagcgccataaaggctgaaagccaagccctacccccactgaacgcgggaaagagagtagcggacttcccaaccttcccacaagagcaacgtcaacgctcgtcctccgcctctgaaatacacggcggctcacaacgggcgacccaagaaatgcatcgaaagacatccctaaccacaacaattggtagaaaattgattatcgatacaatccaatacctacaaacgatatccgaccgcatcttgatctccgacaccatcccctgtacggagtgggccacgatgcatctcgccatgcaatttctacagagcaggtacgaagatatcattgcgggggaagagatggaatcaaacgctgtgtccgaatctactttcccaccgacacagccagaagagaagtgccggaagtgtactgctgcggatgaggagaagctatatgattgagaagctggctataatttgctaatacagacttctatttaccaaggtgccatttccatcattttgatgattctagtagaagagatagactcgcaagaaataggaataggatttcacaatgatcgcgtcggaaaaagcaaaaggaaattttcttttgaggtacataaacaacagtagattttactatctacagggttatcgttcaatttcttttgggaagatgtagtatatttggcaaaatggagaagtatcaattcgaaataaaagcatgctatctatcggtctatgtctatcagcaatcagtctaaacattctatcgatctaaaaattcaaacacaatttagcgtagaactcgaaggaaataaaacaccgttcagtacgccgcaactgctgtttctgcctctgggagaattgagcctacaactggaccttgggctcttctagtcgccgcaactgtgtcctggtacacgtgatacaaagcttcggctatcgttttctgtatcgctcttgtgcgttcatccatattgtgccaaccctcttcttctgccctttcagcaatgaaatgttctttgttgagtatggcactcccgccgatcgagagcttgggtccggcctggggattgacggtcgattcccgactaataccagaggaagccgaagtgtaatgggtctcatctcggtcaatgttgatcggattggatagcgacccctgtcccgggtgcacatgtgcattggatggtggactttgatgttgtcgcggcgggaagatttgtatcgcaggtgcactgaggtgcgaagcaccctgtcgctcaggcgactgcctcgctgctgagcccagtgggaaaggggtgggggaccgatcttcggtgcgcctttcggcgcctccagagtcgctctgtagcacgcgctgatagcgttcttcttgtttattccagacttctttgatctttgcatatgcggcgcgcttgcccttgcagaaacgaatgaaactagatatagggatccaagaacaagaattttgcattttttgggtatcttcgactcttaggtccctccatttgatcttcagccaagtgcatggatcagacatgtatattttattcgggtctctttcttccgaggcaatcccgtagatcccgaccacattgtgttttgtataccgccaacttctgttccctggtccggttttgagcagggaaatgcgcaaagttgggtcggaaatgttgttcattccgtcattggtatatccgtttctatacttgactttgtatctggctccgtggcgaggtccgtattggaggatgacgaaggttgatcttcgtagtgttccccatccatctacaatcgcatcggtttcctcgtcatcgtctgatggatcaaggctcgctagaagttctgggtcttggagctcgtcatcacttcgaaaattcggtgacaggctagtttgattccgtgaatagctggtcatggaagggtgttgatgcccactcaagcttgatccggtttcagtctggtttgccaagccagtgtcaggcatcggagtatcatctctatcgctcggagtggcatccctctcgatagactgtatcactgaatcattcgatgggggcgaaagccttgccgtgtcagttgggtcactgtcactaggagcgtaatcgtatgcttcagacgagccatctgttgggtggtgcccttgtggaacagacttctgtacagccccactagcaactttttgaggagagatagtgttgttgtttgccccttcctctaattcaatgagacgagataatatctctttgtccttgtgggatgaggtttttctaactccactgtttgaagccatattgagagagcaggcctggatgtttccgtgaagagtgcaggcttttcgcggtagatggtgtctatttatgaatttccgatatcaagtcatctgtatggatgtaggaccaggttatcgactgtggcgtacaagtaaatgcgttgtcctctgattttattttctgtatttccgttatgaagatcaagtgagcaccaatttacgttctagctcgttgggatcctccctcagaatacagagactagatgacgcactttatgtggttctgatgagttctatagctcagagtttgagtatgctctcctttcgtaactacctcgaggttcaattttggacccgccactcatccgggcttcaaatcaagcccgcattttggtgagcaagagaataatcaatatatgaagactctagtctcatttttcctcatgagaacgttatttgcgacgatgtgtagcagggtgtcgctcgacaaacgcaaatatattgacctcaggaaccgattgattatattggtcaggtttcatattaaaggaccgcattaagccaatgaattctcgcaagatacaaattctacttgtgtttcttcgcccgcaggagattaggctcagacagtgtcaggtcatgtatctcgatcctgaaaatctgccctctttactattactgacttggccagaactctatgtagcagctcacatagatgctttttgctcttgagcaaaaatgacttcatataatatcctctagccgatcttcaatctactgaccataaatagttgctgtgtggatgtctcattgtccattaaacatttcgaggctcggaccaattttatcggatgattgggatcaatgatgaatattgaatgagagatattgcgagggaatggggtatacgcagttagggtatcttacgtacgcactggcaaaactggctaattcccaagaggagcacgttttggatgatctttgtgaggataggactcaggtatttgagcagaaagagggggattcataaaggcggttgacctgatatttatgctctttttatgtttcacctatgtcttagccttgaaataaatcatgctggcaccaggaacaacaacaacccgagaacgtcaacgttcattaataaatagcttcaacggtatccagatcatgcgcaataatatgaatggttactcaacacatttggctacgcaacgtctcaatatggctacttgaactaaatcccattacactcaattaatggcatgattaaagagcttggtctgttaacacaacttccaccactgtatgtcatatgcgtatgtagctccatatagctattatattgaacaaatatttgatctttccgggaatcacagcatattgatctggggaatcgattaaccaaaacttgacatatcaaattcctcaagacataccctgtcaataagcttgtttgctaacaacatccaacaccaggtgggtaagttcgtgtgttttgctgtagcattgttttgggcattcgatgcgatcgcaggacactacaggcattctggcagtctctagcttaacactgccccataatcttcgtgcaagccttcaataatccactgctgctcttcagcctatcatagatactctgttctcataagtacatagtcgaaggggagttgttttagtttacggcttctcggcgctcaataactcttacagcaaatttttgtttcacggggttataacagtcccctacttgtaggccatcaggttattcaccaagcactatagcgctcaactcgaatatttgagttttggtttactcctttcaccaattcggccaaaaggaccgttgcttcgctcattgccctaacgttagtggaagagagctgcgacccctatatagtaaccacatttctacgatagtgcttaaattgccgttctcgtcgtcatccataacgtgaagtaacagacgaccacggtcccttcacgtaaagaaaacattatttcccttttgcccaccaaaggctcaaagttctaaaaatcaacctttcgcatttttattttagcacctgttttcattggacttctcttgccaatcagccttacaagcgccaccttcagcctagcatctgtcaaaggctatcacttcctcagagcaaggcatcaacttacaatggctgttttgaaaaccacccgatccaagaattcatcgacgaggaaattgatgcgccaaaaacagtgtcgtcgtaagacaaatatgctgaaaaaggcatctgaatatagcaagatgtgtgatgcagatgtatgcgtaggtattcgcatgcgggaaaccggtcaggtgtatatcttgtcggcggatgcttcgggcttttgggcttttcttactttgcaattggtaagtaaactatatggcatcatctccaggcggagcgctaacttcccagagctcttattacccgactccgactgtgatgacagatcgtgatttgtagaaaaccagggaggagatagttttcagggagcagtgataggctctttatgctgtatactagagtatgcaaatgtattacaatccgtcttgcagtatgtttttgcccatagtcctttttgtgaaaaacagttgttgcttttccattcactctcgtagttggtatgtcgaaaagtacagtgtccaaccaaataccacagtagtctacaatatcattgcgggcttcatgaataaagcaggaagaagatcgaagcttgaccgggaagagccgccaaattgcggcagggaaaggaagatcagccgccctgtactgaaccatatcatgagatatacaccttacagtacacacagttggcgatcgtctgattctgcagtcacgtgatgagcgcagaattggggttcaacgttgaacgtaaacttcagcagacgcatgttttgcaacagagatatggtattttactgctggtaattcttcgatgggtactcgatgatgatcattcctaatcatcaagcttataactcagcccagagagccgtaagattcctttccatctttctcgccagcaatgatcaccgaatcaacatcctaagctgctttcgaccgcccaaataaaatctctagtcaacgttgtccgaacagccatttaggaaatgagatattaactcgctaatgtccagtattgcctatcctaagcatgtcccgccctgtttcaaagtttgccgaatggcttgccagagcttccatccaagacaaattcggtctgtgtgggctccttgcccttgtatgctggatatgctgtagcctcggacgcagattcagtcatttgcctttgaggttgcagcaaatatcctggagaagtttcttccaggcgccaacaccaggcgtgctccagtggctagatatcccatcatacttgcaagggggggtgcttgcagtcctactgattgccaacattattacaatcagccttcatgctcacacctgggtggatgtacagaagcgagccggatgcttggcggtcacacatcttattcccctctgctccgggttcagcttcagtcttccggcccacgtctactatgttgagcgggtcaccttccaatgggcccatcggtggctaggccgcctttgcgtgctgcattgccttcttcatgggtccatcttaggagtaaatgctcgcaatacaagccttggagctcccctcgccatcccactcctggtacgtgaagcgggtctgaggacggcggccttcctactcccccgcagtatgtctgactagaagtggctcacaatgaacaggccggatgtagtctcgtctcgatattgccttggacgttggctgcgatcctccgccggtggccgcaattcggcctcaaggtccaccatatccttgcttcgatcgccaccggcgcccttttctaccatttgatcgaccggggatcgtcctaccgttgggttttacttggtggtatctgcgccggatgtgcctggagtgtcgggacatgcctgcatactatgtggttccacaggtcgtggcgcatcacctctagacgggcactcgcgcggtctttcaaccagctcttatggcttgatattgtggttcccatggggtgggaggctcaaccggggcagtatgtacagctctggttgccacgcttaggagtgaggtccttcttgcagcttcctgcattctacgtggcttcggcggacacagtgcagaacgcgtcgggagcaccggccactcgcacattacgcatagtgacccgaccccgaccgggcgtgactggaagggtcgcacaagctgcggatcatgcgacgtacttgacgattcattttccggtctgcgtgctgggtccgtacgggcatccacctaaccttggccagtacgggaccgtcgtctttgtacttgaagacattggactcttccgcgcgttgccattcatacgacatctcgttcaagaaagccgaagccggagaaacacggtgcgaaggctagaagtcctatggcaagttgggctgaaacatttcagtgggtttccccccgttcttctcagatgctttgcggtgtggtgtacttaccggaatagaccatccccattgggtgggggatgaaatctcgcaaatcctcgaactcgaccgtatgtttgatcggaacgattgtcccgagcatagacaccgagatggccggggatttgatgtgagtgaagtctcccttctgcggtaactcttacaattgatcgggctaacttggtggcagatcctgcaattcactacacatatcctagacactcagcccgtggaccagattcgataccgcaaccgtacgcgcttaaagtaccattttcatgccatcaatattgccaaggaactgccacgccttatggatggtacgggcggaacgaccgcggtttcgggtatgagcgctccgtcgtttaccccttgatgatgccaacactaacgggtattagtatgcgcaagcaagccgacacgcgcagcagtacgccgcgtcgttcagcccagaacgagtggtaattgtcggttatttgacctgggtctagaaccctcctgcaagtgggcagacggtgactctttcgcccaagacacatccgaaacaattacagcgccaacagaaccctccaatactggcagagtatttgagcccgattggacaccgagtgccatacccgttgcacatgctgttgttaagcaagctacccggccgtccgggggaacctcggtggatcatagacgatcttgccagagtgataatccggcggttggagggcagagcgctaatcacaaaaggtgggtccagcagaaaatcaccgaaggcggcgtctaggctagccaggtatagttatagaaacaaagaagcctgcactggacagaggaccaaagtatacttttgcgagaaccaggaggatttttagcctatcaatctggttgccgaagtctgcgtgacattcgaatccccacctggcccaaccgtaccttctacgcaataaagacccgttccatctgcatttgacgaccgtcagatctaggtttgtagatcatgcctggacctttgcaaatcctcacgatttcttctcctagccacagagccgtaccagcgtcggaccacacccatgcgcgttgttttactgctgcttcttgcgtccgggtaacatcagagtgtgacagtagcgccatactctcgcgaggggagtgacgatcgacgagaagccagatcatgaggcttgatagctgcaatcttcatatggctgtccatccagtctcccccgaaggaatcacaagtatcgtcccgggtttggggctatattcatcgcgtttgtgccgccaggaggtcgaaatgttattgactacaaggaaacacaaacggcactttctagcactcgagcagtatagcgctagcaaatctacatgataaatcaagaggtggtctcgttggcaaaacggatcatccacgggcaaaatcgagtgtgaccggaccagagtgatacatatgaaaggagccgcagcctaggaaaattcatgattttggtccttatactctgatatatcagtgtccctcgcttgtcagtaggatttgagaggttctatggtcacggttgtcgctgccttgagccccgcgacgtggaagctactttacaggatgattcgcgttaagagtattctacgcgggggatgctgtaagaacaaggcctctagcaatttatagtctcgtattccgaagaacttatcattagaaggatctaatggaatttagatagatctcgcaaattcaatcatcaagatcgtagcattaacaactgaaagttcttcctcatcgggtgctgtattccccttccttgtactgtggtgttttatgatccgatggagttcctccgccgccattgattgcggtatcagccattaaggtatagagtagccagggatataagtgttacggtgagcgttgtggtgagtgctgtggtgagtgtggtgagtgtggtgagtgtggtgagtgtggtgagtgtggtgagtgtggtgagtgtggtgagtgtggtgagtgtggtgagtgtggtgagtgtggtgagtgtggtgagtgtggtgagtgtggtgagtgtggtgagtgtggtgagtgtggtgagtgtggtgagtgtggtgagtgtggtgagtgtggtgagtgtggtgagtgtggtgagtgtggtgagtgtggtgagtgtggtgagtgtggtgagtgtggtgagtgttgtggtgagtgttgtggtgagtgttgtggtgagtgttgagatacgctgttgtggtgagtgctgtggtgagtgctgtggtgagtgctgtattgagtgctgtgatgagtgctgtggtgagtgctgtggtgagtgctgtggtgagtgctgtggtgagtgcgtgagtggtcggtgaaggagaatacctcacggcgggaatcggaatccatcgaattatgtaagtttcttaaacagggcgttcaactttggaaatctatccggttaattacgtcgtcatcaactgtcatctgccagcaataaccactaatgtggtaggtaattgattagaatgaaggtgtatccttctatatagtgtattggatatgtcatttccgtaatagttctatccattcgataggtagacagtatattgtgtgagaattcgtaggttcaataagttttgcgattatatatatacacttgatgcgcgaggattaactgctttcatgtatcttgaatcacaattcaatttataaattctcccttattgatttccacttaagccgaatatattcattatatataattttagtcaaatcatttgaatatatgtcattctctgacatttacgtggttaaaaaattcaaaagtagtatcggcaagctgatcgaatgttgaaatgggaccgccaatttgtagcgcctcttggcacggaggaatatattaatccgaattccgagagatcatggcgcttacttagcgagtagtttttgtctagtttttcgctatgcttttggctcaaaaaaccgtggtccactacatattcaaaaaccgccattgcacttttgcgcttttgcgcttttgcggttttcgcactttcataacgtttgacgttctttaaaagctactccctagccaacaagtctataactataagagcactcacttccttatttcttaattctacattccagcaagtctatttctagagtcccgaggcatatttcaggctacaaactagcagatggcgactacaggccctcgttcaaatggctcttcttcgaaaagaaaatcaatgcgtcaaaaacaaggtcgtcgcaaatccaatttgataaaaaaggcacgcgaatatagtaggttgtgtgaagcagacgtctgcgtcgggattcgccttcggagaacgggccaagtgtttatcctatcggcggatgtctcgggattttggggatttcttgggtcacaactagtatgcaggcagaaacgagtcatatgaccaaggctaacttttctaggcctcttattatccgaccccattttttaatcacagatcaagacctggagaatgccgaagaaggcattataaggaaaccaagcgaggcaaatcttctagcttgaatactataattgaaattaattccccgggtgtgtcttgccaagactggcttgagtgcccaggggcatgtgatctcatttcaatatgattcgtgacaatgcaccgaatattgcgaatgctattgccaaagttgttcaagaggagaaagatgcctctattctaaggtcacaaactcagcacaaaaatcgtcaaagagttggggctcgggatattagcgctccaggcccttctatgaagctcttccttccctttcctagcatttggggcagaaaagtggaggggtgcagactaccaccgaatcgaaggccactgcggggacccactacagcgtgagtatctggctgagaactgtcgtgcgcatttcctggtcgcctctagactatcttaagactgggttaagcctagaacgattggactaggagagaagtagtttacccgtgtactgagtctcttgatttaccagttactgcctagtgacttttaaagattatcagcacaagctaaaagtgtatgaactggtatgcattcaggacaaatgagactaagcggaaccaattcaggatgaaaggattaattgactgaacaggaagacatgcaatctagggcatgttgaattacccttgggccatacgctgataatcggtagcaacaacaccatattctcaactagcccaaaatgactgtatgggaaagttgctagcggtaagttaccgcttcaatgctctgacaaccatcgaactgcgaaaataaagtgctgggttttcgtgtggccatcatttgagggctcctaagcaactcatcctgtttgccaagttccccctgcattgtcgccacgtcctagcgcactatatctattgaaggtggcaaattctggccttgtgattgtctgaacaactcaaaggcaagtaaaaccatgtcccttttggccagaagcatagtgaatggacactgtggaatgacgtgctcgtatagagcagcgctgcgaacttcgtcctcagtgaaccagcaatgatcgagatgctcatcactgatcttgacggaactctggccgattggctgttgcgtctcgctggaccagactcgttgcgccatcgtctcttcgttgtcgatggtgacatatgcctgggaatcccaagtaactatggctttgcaatcttttgcatacatatcctgttgaagaaagtatataatgccatactccgggtcaccgtagtaggacggacgtgattttcattccctgcgttttcgctatgccttggtcgttcgagtatgcactacatggctaggggtggcggaaaaaagtttgtatacttgcactcgctatatggccgcgcgcttggcagagatgagatcttcgaggatcgtcacgatggcttgccggctgttatcgcctgtgttgacgtcctcaaaataatgcgttcgtggccggttcgcttcttcctccgcttgcctgccaaacgccaagagcgcttcagtgccacttaattcttcccggaagcagtgttgctcggatgtcccgtcgttatccgagctatcgaaaataccgtttttgtccctgggtgtttttgccaactccgtgtggagtgtaaaaccccgaggtgaaacagagaaagaagagaagctcttaaatccgatttcgcgtattaccgttttatctaccctacagtatcctgtcttcacaatcaaaatcaaatatttctcttctttgcatcgagcttttccaccgcagcaagtcttcccattctttccaaccagaccctcaggtcaaaaattccctcgctcaaatccttccgattccctttaaacttgaatgtatatccgacatcgtccgcgggctccttcccatcagtatagcggatgcgacaagggctggcttggtagttttgtgtttcatatgctgcaagcctctccccatgttcaaccgttttgacatgatacactgcgccctcaatcacggagtctggagcatccaaaagtgcagggtattgcccccacaacttgcactcatagcccgataaacgtgctgggcgtagctcgggctcggtttccagctccaaaatttcacgaaccatggacgggtcggtcaacgtgccatagaagaaatagggcccagtcggtgcgtcgaacaaatccacgtactggggcgggttgggtgcttggaagaagtagtccgaaggggcggttctgagttttaagacgtagctggagattttcgagccaggaatttcgggtggtggtggtggtggtgggggcggactggtgagattcatctcctctcttgcagtattcgacataatcggagttggatggaaacaataattataactccaagaagtggaatagatgggtatacagttgaacactagaaagaaggtctattgagagtagtgctgagagcgaagtctccaatggccattgtttctgacgcctctagtgtccgttatgtaatcactgcggggtccgcctaggctctacctgtctatccacagtggtctgggctgcttaccgctcacgctagcagtagtgcacacgcaactgtccccagggatgtccccacaccaccagcgcttactgaagtacatcagcggttatctatatttactgttgttttagccaaccagagcctaaactttatgggtgtggattttccagtgagtcaacagtgtttcagaagggctcccgaggaatacgattgctcgctatagtggataaagaggcaattgatgagcgcaacaagcgcccgatggtgatattcttagttgtcggctgctttgcatggtttcaggtcattgcccacttccatgtagaaggctactataagtatgggcatactgtcttctaattgttatcacacactgggttttcactgatttgatcccatcatccttggtgttgtatgatcttcatcgccattcgtacttcaaaatcccgtatttcgtggcctattctgctctagtatattttgagagagcttcaatgtctcgaccccccccaccaccaccacctcctcccccgtcggcagcaggaagaccaaccagtatgttaaacgattttgtgacaagcacctattttctattctaacctataatgcacagtcgggaagagctctgtacgagctgagacttctagctatcccattggaagctttggcatcggagtcgaggttgagtttcttctacagcctcgtgagaatatcaaggcggccgatgatatcaggcaattttccaaggctgttgcatcttcttataatgcttacatggaccaatccgagcccggtagacatccacgtatgcataatgcgatcgatgaatcctacttagggcccaggtttgccgaatggtcccttgactcagattcgaccattgaaatgccgaagaaaggccgtgcgccatgtaggtactgtccttgccacaaataataaggtctaacaaaggataaacagggggactggagagcatttctccaatttttagggcacacgagggctctaggtggcgtcagcatgttgaattcatgtggagatttctacttgcggatttccatgtcgattctaatgctagttgcggcacccatgtacatctatcacgggtgggaggttactcattgaacgacctcaagaagatttgtcaaagcttgatacacttcgagccggcttttgaagccattctcccagaggaacgactcggcaatgaatacggacgaagtaattggctggacaacaagaattttggacaccaaaatttatcccgaaagcagagcattgccgttattgagcgagtttcgaccatgagggagctagtattactcatgaaccctgatcatgacaagatgtttggttggaactttctctatctgctgaacaatccccacggaacaatcgagttccgacgcggagcggcgagtacttcagtgcaagacgtctttatttatatagagattgcgatgtcctttctcgaggcctcggtccgactgggagatgtggaaagactaaagagtgtgcctgccactgtcggcggtctccagtggttcatccaagctgcgaagctaccagacggcattcctggattatttgactcccggtatcttaagctattcttcgctgggaagaatcaaagtgcattccgtgagccaaaaccgctgggtaatctttctccgtacaggctgaacaagttaaatcggaagaaggaagaagacaagagaaaaaacattgccatggtcaagattttgcaggagcctttttggagctgattaggtcttatggcatcaatatcccgatttatttctctgcaagtcgaaatattggcacttactgtcttacctgtttttcatacgttcttcttgattgatcattgagttagctttttgttacttctgaggccctttccagagtttaacgggatggttacataattgacattgtcctttaacgatgtcatattgaagttttaggtatttggactatcttccaatctatgatttacagcatcaaagcagccttttgtgttctatgtaagacgggcgtatacgaagcttgcggaagaagaggaggggaacattgttttacacactaaaccttcataggcagtaaagctcggcacgtactgttttacctgtgtttcatacgtttttcttcattgatcattgagtttgctttttgttacttctgtggccctttccagagtttaacgggatggttatatgattgacatttttctttaacaatttcatatatgctattgaagttttaggtatttgggctatcttccaatctacaatttataggccttctagcgagccccttcgcccttttgcctagttaccttctagcgctacacatagccaaccggtcataatcagtactgtaaggcaagtaacgcgctgcggaagttgttctcagagcctactctcagatcttaacctctaaccgcaaagcgcctgtcatccataaacgacaaaaaaagcccaaaatcctggagcatccgctgataagataaatacttggctgggttcccgaaggcgtattatgcccacacagacatcagcgtcgcacatcttgctgtattcggacttgcctttaatctggagatcaggcgagttggaatggaaggcgacccgctgactcattccaaaaatggcctgaaaatggggttcgtgggcgagtcgccagccatatgcaacctctatagcgctgccaactacagtattgggtcgccggctagcctagagagttaagcaagagtgggagtgtcggcggtttgaagtttcacggtttaggcttaacacccttttgcacacggacattttgaatgtggcagaatcgtcgcagaaatcggcggtcggtgaagaagggtggttagactcctcgattccctcacacccgtccataatcagtaagtctgtgtctgactgcaataatcgttggaatttgacatgaagctgaaatggcgatgtccagcggtattttggttcagaatgactcaaaatcgcgttgatctaaccagtgcgtacagcatagcaccatgcttcttgagggacatggcagggttgtgcttctatgcttctccaaagtggagcagggagtagcgtacgaccaatcatatcgacctactagtgtgatcccagagtcgttctgagaaacctccatagcctatagtcatatattctagcgaaatacaagtttgaaggacaagaagacccggaatccggatctgcccgctgaaaaaaacgagcacgcgtcctgtatctcgaatacgaatgcctaggcaaactgatgccattctttcttcagattcaatctttgtcggtcccaactttgttgaggagacttcctccgcattcctgtttgtcgatgaattggcatactcgcttgacaaggaacatagtgatgaagaaagggttagctctttttttagtccgggtatatacttgacaggcctgaaagagaaagcgaataatcatgataaaaaggtcgatgcaatgaatggcactcctccacactcagcacgacacgtaatagtccgaatattcgacatttacatggagttgactcgcgtacaccaaagccacaaacccacggacattttgcaatgtatcctgcatttgcgtgcaaaccgtatcattgttcctaaccctcctaatgagactccgtttctcggcctcctcctgtcaattcttcaagctgatcttcagggaagcacgacgccctaccgaccatgaggtattcaagaggggctcagcacagacaccgacgtgatgctagtgggggctgatttcattggctcatcagatgggcaagaggggtgggtacttgcacgtcctgaagaaccatgataaaatttaccgagtttgccgcagcctcagtgatgcgaacgtagtcaaaatgacacatcatgtcttggacatgatgcatctgcttgcttaccatgtatgatgctgtcgactaccacaaatttggtaacacgtcgcaaaaacccccgcacttgcatgcatgaaaatcaccgtattttcccctttcacctctgaacggtcaatcttatatagttcaaatttcaattttcaagatctgcaaactcaaagttgtggtccttagttcattgccaggactttgaacgaagtaaacgttcaatgttcggctcttcgccagcctggagatgccagagattttccaactcgcatcagccaaagagaaaaggtgatatttctcatggcaaaggccctgcgtgagctttaacgtttttgacatgatgatagacatgtggacgaaatcgttgtcttaatgtcatgtacagtcatttctatatccatttcagtctcagctgacacatgtgtatgacgtgtcaaaatatcgcacgcactagataacacaaagtacctctgtcaatatgagaaagggctcattaaatagccaagcttacacctcgctctccattcttcagtctatggagaatgactcgaaatatttttttgctcgcatattgtttttctcggattcaatattgaactgtgttccctgtaacaagcaatttcgctctcaacaagccttggagcagcacattcaggttgggcatcgttgtgagctttgcaataaatccttccaatccatccactcaaagcgtcagcacaccagaagcgcaaagaaccattccatggagaatcatcgccctgtagtcaaagctgcaccaccacaaatgccagtacaagactgccaggaagggaacgatcaaccacctgaattggggattggaacgaatggcgataatctgaatcttacatatactggagtacctcgagctgcagtaacaccggtcttcaaaatagcatgccgcctccgtttcatgaagcctgacgtcaatatgctactgagacgcatcgatacccagttagacactatggtcatctcagcgcttattgaagctgcccttcggctgttgccgcctgataactctcccaatggtagagccgaggcggaagaaagaatgcggcaaaagagagagcgggcgctcatccaagaaacgtcttttattgaccgaatgagagatctcggctatcaatttcggaccgagagagagcaaaaggaattacgacttagcccaacacctgacatccgatttcttgagccggtatcagtgaatggacattcctgctactggatagaatacaagaactactttgggtttaaagcgaatccatttatcacctcgaaaaacaagaagcaatttaggaaatatgtgtctgggttaggaccaggtgctgttgtatacaaattaggatatgaaattgaacacatagcaatgattggggtcgagacattccgggaggctgaatttctcaacaacctggagcaagagtcaaggctacgaaaatgagtgaatgactcataagagaaggttttgaatgttttcttggatgcatttcgcatggtaatatcaagcccgagtgatctaaatttctgaaacgctttttgagggtcgctcttaaacgtgtttataggcgaatatccagataatagtagtcaataactagatatcagtcaagagagggggggcaggggcgagagagttctagtaatgtccatttgtctctagattcctaaccattacttctgattggacaacgtctcatctagcgttgcagcgtaataaagctggctctgtatctaacgtaattcacaagcgagccggccatacaagccagccggccacctcgacactatagtaaatgcgatgtattctacatttaatctctttatttgtcgatagtcattgataaggctcactagcgttatatatcaatatcaaagaaagcagagagctattttgtgaccatttcaaaaattaccgaaaattacgttgctaaaagctagaaatatatatcatgcaaccacaaaggcatcaatcttttttaaacttcctagagatactagatatgacccaaaaagcaatactctacaaggaaatcttcatataaactaccgttgttgatatatcaagttgtaatttaccgcatttactatgtgttttggggtggccggctggcttgtgaattacgttatatcatctctagatatgccacttggctacttggtggatgaaaaactctaatgaatgacaaaagctcgaagatttgactcgtattggagcactgtaatgccagcagaaatagcatacaccgctggttccgccaaccaggcgctataatctcggcaaggtgcggggtagattggtcttcatattcaccaaccttgacaagtaatcgataactatttcagatttcttgggcttcgtgatggagtccaaaaaagcgattcaatttcctgagtaaggctcagtatttgccatgcggaaaagaaaaaatttaacaaacattagatttctaggctcggataccgttagcctttgcaccacatcgagctctgaatcatggaaaatccatcgaaagctcttggtgtcaaaatgcaaagctttggaatctgctttttctcatgacttcccggagcgttcatctggacagtatatattcaatcaaacaacccacgatactgtcgcacgtttcatcgaatgggcataccgggacgactatacggagctagatcttacacctatggaggtcaatcaaagatctcggccgagatcagagccttccgggccagctaaaccaagcgaagacgatcatttgcaagcgcacacattgctatgccacttgagagtctacatattcagcgacacatatttggttgatgatcttaagaacgtagcatttgaaaagtttacgacagttgttaaggatgtgggaaatccccaaaatttgaatgagcaacttgcaattattgactgtctattattggcgttctcaacacttcctccgcacgataagcttcttgaatggctagctcgatatgccgcttggtgcctctccagcttacgtcttcaagtgaagtttcatgaattgcttcagaaaatcccggcactcagctatcgcatgatggaaactttaagcccggccaaggaacctccttggaatataaaattgtcgaaataccgtgtcccctcttacgatgctcgcactggtgaggattttgcctatgaagactagtggaaagggggaagcatccacgatctcaagctctcatctctacaatttctatgatgtcttttcaagttctatagcaatatcacgctctcaggaaactcgcctaattcaaatttgtgagtgtgatagaaattgattctgaagatgctgcgggatccttgggcttaacttgcctattgtaactttactagttaattgatctaggcgatgcatccttgtaattatctaatctaatattctagtagacttaatgaaaattggattggaaagttttcatgagcattgaataagagttcggattggtcttgcttgagaaagacaacgtagtgggcatgttcacgatatatgctggcgatggatctgatttagttcagacagccggagcaaaaagcagctgccgaaaccgaccaaagtggatagcaggctcttagcattttgacaatttacctattatttatgtatattctccctccacggataggatcaaccaaagatgcgtcactccggcgcagcccacgcaatgccaattgtaccccgcggagcagatcagcaccgaatggaggatattcttgagtcaggtctgcaaatttatagtcgtcgcttcgcatgtacccttcgaccgaagcagcagccagaaggcgtcgtacagcatgatcatgaggcagattcaacgccgagatgatgtgatcagagttgataaaccaagtgtttcgatcaatgccgtagaattcggtatcagcgtcaagaagtatatcttgaatatatttcgccatttcggtttccaaccctagtatttcatacatgtctgcaaatcttaccagctccatggcagcagagatattctcctcacggttcttgatatcgaatctgacgataccacgatatagccattgaagaagtccttcgagggcacggtttgagataataccatccatctcttctaggtcgagtgcttggtcctgtgattccttgaaatggccgtttttgaacatttttgtgaagacaggtgattttgcacatagcaagtctcttgagattgcaatctcagcatcacttgtcttgactcggattttgatagtaggctcatggtagagaggaagcatcctaaattaaagccaggaaaaactccgttttcagggccgcaaggcgcacttgctctttgacgaaatcttttgcactaatattgaatatctcggccattgctaagaagtgcacaaagtgagtaatcgatagtattgctggatatgcctcagtgaatgctgctgaagagaaaatggcggggcaaaggaacatgaaaaatggtggtccacatgatacatctactaaaaaagggtcacctgaccgaacaagaaagataagcggcaacctgactgacttaatcatccgattttgctcaaagcctactgttaaaggtgatttgtgattgcgagaaatccagcccattgaatacaagcccccgcatgtttatctaccaatgtcgaagcgtcacctgaaccgagaaaattaaacgcgtcagtccgtggacagctcaaccgtcaaaaaaagctaccgatagaaattagtggagctgggaatggctcaattctggaaagtctttgacctgtggtctcgggaacgtttcttccttgcatcgccagattgaacttcaacctccgcctaatatgaccatatccatataagtgttggcgatgaacctacccaaatgactacctcattgccaatcatgccaatatctcaatcggagaccaaatggtgatgaaatacatccttcagcagcgggaatgtctgccaagtagatatgaacttgggcttagtacggttcgctacgataggtgcagtcgagccgcccctactttgtagtctgtccgggctcgttagttcatccgggaccctggcctacctgtgatgtgtatgccatctagaacattgttctggcctatttttattaaatgcatcttccataccttcttttcatcaagggcccgctggcgattgagacgccaagcaattgaactgtggtagcaaatcgatcctctggaccggcatatgaccacatctaggctgtcggcaaacatcgttgccgcatagcagagaattgaatggagattgagagcgaatatcgactgatggtagacctcatcccccgtcgcttactcttgttcactgcgcttacatctacgaagagattgatcacctgtaataactcagacggaaaccggcccgttgaatgatcatactttgctaaatcatatagtggaggatgttccctgacgccaaaaaaacccgccctgctataatcagccgctctaatgtccaccaatcgtgacgtgtcgcctcagctgaacagattgaacggctcagtccgtatcaatgtccgatcctgattcttctttggggtagtaattacgttcggtagcaaggcgatgaacatcttctgcgtgtctgcgaagatgcatttcatgtaggagatcctcactacacatatgacatctccgatcctgtaagtgcttttctcgaaagtgtcgcaaagttgatttgtattcgctgtacttgtgtgttcgatgatgaacggacagcagcttattgccgtaacattgaaagcatcgtcgaggttttttggccttccaaatatagtttcccgccttctccagaagcaattgctcctttgacatttcaggagagatcgaggctaattttgttgtttgctctttcattgctgagtgctcttcgtcgtcttcatcgcttggggccggccgtttacttcatccacggagtggcccgccttcaaggtgatgacaatattgcgagatagcagcgacagcagcatttcgtctctgtcgctctgcctccaatgaatgggaagttggccaggtcaacaacttttctagaagatcaatttgctctgacagcatactgtctgttcgcaatacgtttttcgcttcctcgttgtcgatagctgctccagagagctgtcgctcaatgtctaggttcgcctgtttacggtcaaactcctttcgaactttctgtctcaatgccctctctagccggccaaaggtgttgagcttttcgcgtgcgagtctgtcacgtcgcaattgcatctgttcactcggatcatagatgcagagttcagcttgctcatccaatcgccggaccgcttcgacatactctggatgttcacggatcgacgctcgttgctcaggagtcagatgccgaggccgtctggtatcaatccacctgctcatgcgggtgattgcacgcatgagagatttgttggattggcggccgttcatcacattttgcatgtccgtgtcaacatgtcgcggaaggtaatggttgaggaatgtgcgatcagcgtgcttcatgatcagattctgctgagcttcgctgaccgaatcactattgttcaacatctttccacctccatagcgcatgcggtgcgcaaacatcgactgaagccaaccatgaattccggggagattcatggttggcttcgaggaccggggattcaaaagcctgcagccagaaaagtataccaaagatgaaaacgtgggggctgaagataagcgacggatcgtcaataatttcggggaacgcaaaagtgttactaagaagaatcaatcatcaggccctttagcatcaaggaatattagatactcacatagcttcagacccgaagaaccgcttcgtatgctccgacctgacctcggccagaagcacgggagggccaccctgaggatccttttgtatagagaactgaagatgcttcaactgcaaggacagcagagcactcagtcgattcaccgtgaatatgccaagcatgctgaaaagacacatctgaatacgctcgtatccgaaattgaacccccgttcctgtgttcgaagaatggtctcattcaattcggtcaagtcttggacgtagactggttctttgcctcgctcttggtcatctagctcgaacttgtcgatcagtttccgaatcccctagaattcctattaagatacttggcgaactagtagactaatcgagcacgtcggaaccgcgaaaatatgatatgtgcgcccgaataaaacaggtggtagagggctcataggtcctaatcctccagcgactgttctctatctctatattggcaaccattagcttcacctgttgctttacaagataacagtgaatcgaggccaatgcccgatcaacatccgaaatgattgccgcactagaaatatcacttagttctctcttcttttgcccacataaattcaataagaagactttcgtcgacgttcttagttgaattatctctgttgcttgattggcagtttgcagttttgtattcagagatgaacgaaaatagaatcgatcaaataattagtctaccggaataatctgttcaacttctgactgttctgctggatagcagcttggggagacccgagtggttccctgcgaccgaaaatagcgacagcccgacatctctcccttccccaatatctcctggttggagcttacacccactgcacaaccaaccatggaggaaacctttcggtccttaacagcggagaaaatccaggagctgctagtaatctgcggaatcagtaactgcagcgatgagcctatcaggcaacacatacttggcatttctaacttcagtgagcccccagactgctgttcgagcaactttccactgacacgcatagtccgccaaacaagacagcaggatggaataacagatccaccacctcttcctacccccgcagctagtccggatcctgaagcaaagcgcggctcttatcggttcctccccacacctgaaaaacgaagtagagcggactacacggggctagacgcaccgtctcatagaaaggaaaggaagaacaaagtcaaggcgaaagataagactactctcaaagcaatggcgcaagggatgaatgatgccgcactacctctaggaggcatgccaaccgattcttcgtcaaccgataaagcgaacacagcgatgaacttacccccggctggggcacccttgaccgactcacacaaccatcaaggcggaaaagcgccgcaaagtatcgtcgagaacatacttgtcaactgtatcaaacttaacgatccacttggaagatacggacaccgttcaaagcaggcaattatgacaacgaaggttgaggcgattcagagttttgtggatgacattgtcaagttgcaataccccgatgcagtccagctaatcaagcaggagaatgcattctcagcaagcaatagtatccaatctcgatttaacgagaccgtgtattgggaaatcatcaaaaaaggcgccgaactccttgatccaaaggatttaccaacatccaaaggccctcttgatgaattcacgatggccgagaaggtcgccaccgagcgcttcatgaaggaagcgggttatggacttagccttgctaatcaacggcagtgccgtcttttttggaaacgactgttcgagatgcggaacgcgggtgttgacaaaattctcttgtatcgcacaaaggaatttgaccgcttctgcaaaagctactcatcagaatctggggcttctttggtagagatggtccggaactgggaagaaaggtatgccttccatatcaaacagttggaagagcgtgtggctgaggagagcaagggcgatttcacaggaagactatggctgagccagccgcttgtagcggacagacttagtgttcctgaaaatgcgtggaacagcgctatcaacccatggtcctccagcgtagaggaaaccgtcttccgattgagcggatcacacgagccatcagctgttgcgcttggtgggttctttgacttgcagccaaaggcagaaacaatgcagaacaagtctattttcgttactcttcaacccaaaggtgatgtctttctcgcggtttgccccctcatttcagtccaggaaggagatacccttgggatatttgctggagtgattcggtactcttcggaatgcggcgttgtctacggtatacctggtcccgaagaaaacctttggctggactacttcacggtgactggggtactaaacctcatgaagatatcagctcctggaggtgacttcaatgttcgtcttcagtgggagctcatcgacggacggagtgaagggcatctcatgtggaaggtctcggtcattgctcttcgggcaattcaaccatttgaagaaattgttcgcgctgctcctcaaaaagcacaatatctcctgcaccagtcgccaacttgcgcaaagcgcggttatacgaaaagccgaagttcctgattcttgttttttatttatatccagtgtctagttgagcgtattctaaaacgccattcaccagtgtcatccgtcatgatagagcaaaagtatatgtatttagcggccgtcgtagtcgtactggttggcatggagggtatctaaaatttggactgctaaggacactttgcgtaagctcagatgtaagacttttaaatgtcccaaggctgagttgcactgacgagtcaacagatagcaggggtgagaaggggcatattttgtgagaggggtaaacatgcattgtcccggtcgatgttacacagcccatctggcagtccaaacaggttccgcccgtcaggcaagcaaatctttgtatctatcaagagccatctctcaaacagaccagttatcagatacaagcactttggaaccaccaccactgacaactacaactattattatccttactttcggggaacatgctgtaaaatgagcaggaaaagagaaggagaaggggattgagaatacatgaaccaaggcccatgaaatgatttgaccaggctggtgcatgggccctgccaagttggatcagatgcgaagaacaacggctattatgacgcattgacaacgcatagttgcacttcgacagggtagccatgacttggcagattgaatatttgcttttttttgcgctcgtgagacgattctgaaccatagccaactaggctgagtgcgaattcggctcgattcccgtactgcaccggcctttttgcggttagtgttacctagaacggagacgtgtcatgtgcggggcaagtttgccaaacccactttaacaaaagatctgcttttcgtattttggcagaaaaataaaatggtgaacacaattccatgattcttggcataatttgccaggtccgatctgctccctacatagtcttcaatcttactgaaaggtgtatgacagaaaaatcccggagccgatacactacgctttgactagccgcaaagataatgaggatttactcccttttggacagcatctaatataattttcgctgagaactattttgtactagtcggccgaatggacatgatatcagctgttgttggtcttccgaggcaggagatgacctgcaactgaaggtagttagttacatgcagtcgctttgggcaacaaggtgtagtcttaaatgccgccgacgccaggaaactaaatgaaagccatctagttgtttaagaagggcggctctttcactttgactgcaatcttcccgaggaagaaaatttcatttgaaacgctatggaaactacaccctccgacaatgatatatcgcgggaaaccatgctacgaattcagcaggatttcctttctgcaattatatctgtgacaaggaaaagaaagatgaaggtgattgggaacatcagaaggctcaaaaagtatttggaaaaccaatatcttgatttcaatttccagattgatggggtctcacctttagcgcaagcaacagtgaaatttggagttctcgaaaagcttctgcaggtggaaagagtcgatttgaatttccgcacttgcgacggtcggacgagtctttattccgctatcatgttgccacagaccgattcaatgaatctattgatgagcaagggggccgagcttgagccgaaggataatcacggtcgcactcctctatctctcgctgcagagcttggacgaatagaccatttgaaacttctcgtggaatccaacgtcaatatcaattcaacagatgagagaggttggtccccattattttgggcgatatcaagcaagcaaaatcacgttgtggaatatttgctatcaaggagaggcattgctgtcggtgagaaagatgtggacggccgaacaccatttgttatcgctgcacaggcggagaatgctgaaagcttaaggcttctcaccaatgtcgcagccacgaccaaggaatacttcaatattgaaggtagtcctttggcatgggccattctccagaaagatatcaccactgttcgaatttgtctacaagcagattgcagacttggaattcgtcaaatttcaggcagaaccccattatcgatagcaacagaggttggaagtagcgacattgcgaggcttctcattgaaacaggagcagatccaaatgcggctgatgagactacatggccaatcctgaaacacttatcatttgaaggctatatgccttctgatagttttctgcgatacgttgactgttccatttccaacgccagcccaaattccacgggagaaaagccattactcctcgctacagaaactgagaatatcggagtcataaaactgttgcttgagacaggcgcagatgtgaacacgtgtgacacggcggggctgacagctctcacctgggcagtcaagcgaaaacttgagcctgcggttcggcttttgcttgcatacccagagactgaggttgattgccgagataaacatggccgaacgccattttcaatggccgctcaattgggcgatgtacatatcttgaaagagattgctcaaaggagccccgacatgaatacagaggatgaaaaccagcggacgccactcatattggctacaaagaacaagcatgaaagcgctgctgagtttttgctcaatttaccagaaactagaattgatcatcaggatgatcaaggtcgaacagccttttccttcgcagcggagaatgagctggtggagactatgcaaatgcttcttgagaaacaagcagatccacacattgttgattcgcacggctgcacaagcttctggcggtttcttaatgcaaggaagcaatggcttgactctctagaaaatgcgaagtttgccgaggtcaatccatttcgcctccaagccttggttcgctccctaccgacgcccaacaagcaagacccgtccggccgtaattggttttcatgggctgcttcatatggggatgaagaaattgtggagtatttcttgctggatgatggaaaggtggacgtcaatattcgggacaacacccaagaaaccttttctaaaacgccgctaatctgggcgctcgaaaatgaaggcaaagccatgacagagctgcttaaatcgagggaccatctttcaatgcatacaataatcgaagaattgcattcaccgaggaaaggccattcggagaacggagaccgaaaaaagaaattgttcaccctgatcaaagcactcgcaaatacgggctacaatctcgatcagcccgattcgaatgggagaacaccattgcatcttgcttgtctttatgaggatgaagaagtggtgcttactcttgttagtaaggcagatcaaaacagcaaggaccataacgcaaagattcctctacaatatgctttggcggcgagaaacatgaaaattgtaaatttgctgctggacgcgcgaggagccgaaatcagttctattagctcacaggaatggttcaatctgagagctgaaaggccttcttgggttcagatcacaaaaaggatgcaaagagaaggctttgatttggaactcgtcgataatcctcaatgcgattggttacctcgagccagagagtctagactttggtgagccattatatttgaacaaagtattgggtctactgacaagtgcagcctttgcaggacagattcaacatggtcacgattccttttacactttgggattcatgatattatgatggaccacaacacttatcttaaacattcccatagtgaatttggccaccgatcttttacgtatatatgggtgaatttccccattgaagaggaggatgagagtgccagggtccggtgcccgtggggcattgcttggatcagcaataagacaacagaaggccttgctgatggatttatcagcacattaccaagcgcatgcataccgcaaaatcctgctgactttgtggggcagttcctcacatgtctgtaccatgaatggaagaacttatgcaccgatgcaagcaaaagagttgaggatttggtgagtggatagaccgttatatgctatttttccaacgaccaatagactcacccatatgaaccacagcgaggcgaccaggtcaggaaaaaaggacggagcttcaatctcgttaatcggcttgccaagaattcacagtctcgtgcacgccttcggcaatgtttgcaatcgcacgttgagcaactcagagatatggtcaatatcgatccctcgtttaacttggaacaaaaatcgagaattttagccgccatcgacgacctcgcacaggttgtaaccacgaagcttgaccatttagagcaggctatcagagagcttttacagatcgtatgcttgcagcccagaatcctaatacagaaaattaaactaagtaaacaggaacttgcttgggtttcaacaaacgagtcagcgagcttcaagcgcctcagttggattaccgtgagtgcagcatacttattttggggaccatgtcagttaacaaacactgctttaccagtttgtttttctacccctgatgtttgtatcggtaagtcgtgctactcaactaggatttgccgtgcttggaattttggctaatgtcatggccagagtctttttgggatgaatgtggacttgctacaaaacaaccctgactggaaatggtacttattattcggggggttgtccctcatcttgaccgggactttgtggatggcttctaaattctttccagtcagtaatgccactgttctaaattgctagcgcagaatgctaattatcatggcgtagatacctcttcaaaagcaaacatctcgggcgccaagaaaacactcacacaagaacggggcgtcgtcgaaagtcacttcgagcatgtgctagaaaattgaagttcaagatcaagacctggagaagtgctttacgggtgatgcttcaccaaactggccaattcagtctggagaagcaatgatacaaaatatacgttctggagacaaaagcgcccaacttcatttccgccgactcctcgcaaaatctgtattggtaacatactagttatttatttgctacaaaaagggcatggcagcggcttgaacttaagttcgcgacaaagactattagagtgagccacgttggatataggtccttactgttctcatgatgatacgtttgcagattatttatatttgaacaagaaactctgagcagagtacagagaaacgctaaccgctttcagctcatcatgtcccacatcagtccctctcattcacagtcgataacaaagctagaccgtcatggcttttcgccatgaaatcactcaaagaaagatttcggaaacctctattgctctatgtcctcaaacgaaccggcaagcgactaaaacaatcattcatggacttgaaaatgagcggcgccacaaggcgattcgggaaattagttaagccgaagtctggctggcgtgatgtgattggcttctctcgcaccatcgttcagaatgccactagtctaaatcaggttactagagcaacgaatatgtttttgggggcctatgatgaacttgcatatcgctttgcgaggagtcaatgtaaatgaatactactactactactactaatactactactactatgataaacttgatggttgatgcagcaacagccattaaacaaatgccatacaatcagattgaaacaagcataagcaagttatataagcaaataatccctgatctctgttcgttacttgcttcacaatcaccaatgatagtaaggtaaaactccgcggacgagcacaaggatcactttctcagccgaatcatgaaggccatggctatctttcgtctaaaaaagaggcaccatttggtcgctaattgttatgagcgatggacttccgcctggagcgggttgatgacctccgggggacgactaagctagttgacatttgactagcttcatactctgctgctatgcacagcttctgcgaacttctcaactgggtcatccgagttaacgggtcacgattgccatcttttaccagcaagatgcatgggaatacggtcagaatgttcttatctcgagcaacctggttttggcaatttgggactgcgttatctcccgggaagggaaaaggctcccaatcgtcatcttcaagatcgactagatcaaactctgtctcgtatcgctgctgagcgcgttggactggaagccaaaagtcagccgcttttagcgcaatcctctctatactcgcgcggatcgaatcatgctgagtttccgagagcaatttccacagatatgaagacatattgcggaccaccgtctgaactcttgcttggagaagactctcttcggcattgagactgagcgagagaagaatacgtcggtaaaaactttccttctcggtatcgttctcggcgaggtgactgaggattccgtaaatttcagaatcttcaggtaaaatgtaattaggctggaagatatttttgcaaatttccctcgaaagaatagccagggttatggtaggcgcatccctttagcttcgggagagtttgagggtgccacggggacatattgctgagaaattctagcattctcttttcgaagcttctcccagatagatatgtcctttaggacaaacaaatgagcggacaagtcgtgaaaggggctagatatacacataccttcaagattttttctacaagatcctccttcaagacggtagttatctcgcttagagcaaagatccaaagatctgaaaagttcgtcgaactgggtgaaatatattagcgtacgaatgtctccaaatgcccacacgtaacttacatcgtgctttcatcaagctccaattgaggaacagtgaagctttcgaggtttcggagttgtccttggctcgtttgtaattctttgttcagtgtagctttctcggcttttaactcttccattttatgctgcgttgataaaagcattgttttgagacttgatccagcagtcttcattttgtcaatgatcttgtacatactagtactgtaaatcttcactctacactccaactatcccagctcacagtagaatcggacttgctccaacgaggcgaccatattccgggctacacgtagctgcacatgggtgcaagaaatatgcgcgcaatcactcgcgtacattgagcctatagggtcaagaacacgttgcattctagccctactttcgcatgcataaactagcatcacttctattgcgcttacaataatggggctcatgaacctcccctcgtacatttgtagagcacccgttcacgtgtagttctcgatcgcaatctctagatggaatccaaacatctataaaatggctgtgtggtatctcttcgcggctctttagaaacttataaatacatcagactctcttgtcggaccaaaattcgttttatgtattggcaaacctgtgaatattcatagcccaacaaagtcttttcatcatgtcttcttctagcgttcaaagccattcaagcgcaagccagtatgtcgcaccttcgacctttaacagcgatagccttcagagctttcttaagaaagtcagtgcactggcgtcaagccctgagtcccaagctgcgtcggctatgattgaagaattcggtcatcagcgtgaacaagtccatgctagaaatgaggagctaaagaaagcccaaaatgagatcctcgatctgaaggagagaaagcgagtcgccattgaggagatgtttgcggccaacgagagcgaaaaggcgaagcaaaaagaagctcttgatcaagtcgactgcgaaaccgctgagacgcctcggcgaagtccaatacggcctggaccgtcttcgcccttgaaacggtgtctggtttacctttctcaccttcgttggagcctcccagcagactcgacacgctgttcagcgcgtctccaaccttccctctcaattccgccctcagccctcggagtttcgggcactccattaatacgtggctgactgtctcctgcgccccgcactcgcaccggtcgtcatcgctgtatccaatcttcttccgatagctggatagccagttgtggcccgtgcgtagctgcgtcagcagatatgcgcgattcctcggtaaattcccgtagagcttccgcgtgtactgcgccggtagatcgccgtcaatttttcgcaggtgggcacctttggtacttgtcttccactcttgcccccattggtcgtaaattttgctacggacgaatgcgttctccctcgatagaagcggtcggaaggggtgagttttacccggctccgcggcttccttcgcgcgacgatctgcagcgtcgttccctgcgttttcacaatgccccggcatccactggaggcgaagtgtgatattctttgcttgaacctcggtggctgtttgcagaattgcatggacaattcgttgccccgatctattttttgcgttctggattgcttgcaaagctgatctgctatcacacaagattgttgccgttatgtgcgctccatttacgacgttggtacgttgatggaccagcttatacaccatattgaccgcatagaagatgccaatgagctctgcaacgtggaccgaccaacgttccatcggccccacctggatctgttgagattccaccacctcatcattgtcgtcgagtgcgacaacagcagcccccaggtggccctcgcggccggaggcgtccgagtagacaacaatgtctgacgtgtcctttgcggactctgccctgtctctcgctctttcccggtcgggttcaagctcaatctccacgaaggcgtcctttcgccacggcggcaacggtcgtgggtcgatcgtctctagttcgttgagcctgtcgacgtccatggtcttcaacgcttccgctagggggaagcgcgcgtacgatcctatgttgtttctacgattctgggcgcgtggtaatgcgctccaaatggggtggtcacgcggtagagtatgtagtctcgcgatggtgcgctgcgcgcggtgacgaaggcgaagatgcgtaggaagtatatgagcttccacctctaacgttgcggtggctactgtccggaaggccgatagaatgcggatcaacgcggttctctgtactgtgttgaggtgtcgcaggtgggtcttgtcccggagcgggtcatgccagactgtcgatgcgtagtctatgataggtgtgacgcatgcctggtagagctgtctcatttgttctgggcgcaagtgtcgtagtccacttaaggcgatagtggccttggtggcgcgtttgatggcctgctgaacatgttccttccagcgaagcccctgatcgaacgtcacccctagcaatttcgctgtgggtgacggtttgacgacagctccattgaaggtcaccccttccgggtgttctcctctctttcgggtgaggtggatgagctcggttttctccgccgcgaagcaggaccccgttcgttgcgcccactcttcgatacgcggaatatcctcagcctgtattttggctacattttcctcggctgaccggcccactcgccatcggaagtagtcgtcaatgaatgccgacgcgcctccgtgggagtcgacgggctggtcgaccagatcggcgttaaagaaagcaaacaggatgggagacagtggcgagccttgcgctagacctgcattcactagcagctctgtctcggtacggaaatcgtcgaatccaatgttggcgtgccggtcactcatgaagctcgcgatccattttcttgccaccactgggatccctctcgcctgtaaagaggcatctaggctcaccctgtttaccccgttgaaggcgcccttgaggtcgaatgcgattaaagttaccaccttgtgcttgtaccatgcttggtcgatcgcattcgacagcaccagcaatgcttgctcggtggttctgcccgggcgtcccccgaactggctgctcggtagcaagccatgcttctctgcaagataagataaccgtcgggccatcacggcctcgaggagcttcccgagcgtgttcaaaagtgagattgggcggtaagcaccgggcatcgcgtaatctggcttgcccggtttccgtaagacaataattttcgcgctccgccatggttttgggtggtgtcctaggtctatacacgctctgaagatgctagtgatgaagggcttcaaatatacccatagctttttccagacccgcatcggcagattgtcctcccctggcgcagtggttcctttcgctgttttcagggatcgctctatctcgagtgtggtgatcgggtgccacggaagttctggttgtggcgacgctggtaggctgggatcggatgtgttcattgcgggaaagaacgcttcaagaaaggcccttgctttgtctttgttctgggtgagctcttgtgagcccaccttcagagccggggtgcacccccacgtttctcgaggcttcatgtaggtcgcagctttccagagcttcccatcgcccgcctcatctaagaactgtttccaatgtgacgctttagccttttcgattgttcgagtccatgctcggcgcttagattgcatggtctgaaaggcagcagtggtgctagcgtggtctcgtccaagctctgcacagctcgcctgccatcttctgcgcagttgattgacttcgacttgttgcaccttgagatatggtgtgaaccaccgcttggagtatggggctgggcgagtgtcgggcgtgaactggtcgactgcctgggctgtcgctgatgtgagcttctccaccacccggtcgagtgttggccgggtcttgatatccttccaggggctcatcttccgagccacctcctcgccgattctggcccagtccgcgcgctcatacgcctttcttactttgtcgtttggcttgctctggggttgaagatcccattccgagtacgtggcacggtggtcggacccatagttctcgtgatacagatggcacttgacaagccgttccggtttgtctgtcactgttagatcgatggtcgagttttggcctggattgttcaaggcccagtaagtcgctgtccctcgggggaggcagctgtggaggttgtggctttggagaaactcgatcaggtccccggcctgctcgatgaatctgggtgggatgtggttgccgccccacagtgggtgatgtcggttgaagtctccggatagaatgatgttcgtcggccgctgctcattgtgcagcgtggtcgtgatggtgttttgtattgctgtaagggctggtagtgctgactcatcgtcgcccatgaaaagcggtgctggaggtatgtagaccgacaggagaaggatttgggagtcggctgaccagatcttgatggctgcgacatctgggtggtcgcaaggtatctggcggtgtgaggaggtggaaagtcgtctattgacgtagatcaggctgcggaatcgaactgcgtcggtttgcgtagtaggtcgataaagtcgccaagcgctgtggttgacatgcgtgcggtatgtggtaatggatggctcctggatcaaaagtgcatccagatcttggctctgagggtcattgatcagtgcctccattctcggtcctgatttcattatgttcaactgtaggactcgaaggttcctttctagcatcttgtggggttgaaggtcgccggagctgggcactgtcgatagcccgtagggtgttcaccactacagtcgaggcatctggccctcactccgggtgggcagcgctcccgttcgtgttggcccgcacagtgtccgcatcgtggcatttctttgcacgtccatgccagatggccaaaccgttggcatcggaagcatctctttctcttgatttcccgtcgctccacctggtgaataaagttcccactaacaaggaacccctcccgaagcatatggtccgctccttctgcggagtcgaaccaaatgcccagagaagcaaatttccctagggtcttgtcttttgctttcatccaggccagctcttcgatgcgaaagccgtgttccgctagatcgttgtcttcgataattttttctaccgcctgagtggccccggtttccaggtcaaattcctcggtgggggttcggtgtacgacgaccccaaaccgtggttttaccagctttgtgttgttgcccaattgatgtagccactcggtgttgctgcgggccgcctcagtcgactccgtgttcttgaatcgaatgatatagccagttttggtagtgccgaccccggccacttggacgtcttgcgttgcggcttcgctctgcaatgcggtgcgaatgtggttgttggcggcatcgatggggaggtatcgcccgaaggcgtttccatcattgtcattactgtctcttgggtccacaaaggtcctttgagtgctgattcgaatgcaattttgctctttctcgggtttagggtggttcagcggggaggtgtcattgccgccgctagctgcgactgtggcccaggtcctggtcgccgtcgctggtggggtgttttccacttgtgctcgcaacgctttcacctcctcgtgaagcttttcgttctgttcctgaagaacattctggttgtgtttgatctcctgcagttcatcttgggtagctacgatggccgcggtttggcggcggatgatgtctttcagcgtgccgatgagtttccacacctccttggtggtgattcgagcagcggggtccgcaggtgcgaagacatcgccactccgggttcgcttccggctctcagagagcaagccggggctgtcagcagccgccgtagcctgcagttcttcccctggtatgctggtgatcgtttcttgggtgtttgtgggaaagggctcgggccctcccgtcggtgggtccgacatcgctttggggatggttcccgctcggtacacgacgttaaagttaaaccgctggttggatacagggccccttctatgccttgaagtacagtgcgccaactagatacagcaatattcgcttcagtacaggatcgctcggtacaggatcgagtggttcccgcaaagatcaggagtgtacagggtagtagtagtagtagtagtagtagtagtagtagtagtagtagtaggattcatttaccctgtcccctcgcgaacgatatgcaggatacaacaactatatatcatgaatgaagtacatgtagagtggtccactttctgactgaatcttagagcctcgtcacggcctaccctggcccattgccgctcccgctgttaggctgcccctgtggcgtacgactgcgaaaccgctgtgnnnnnnnnnnnnnnnnnnnnnnnnnnnnnnnnnnnnnnnnnnnnnnnnnnnnnnnnnnnnnnnnnnnnnnnnnnnnnnnnnnnnnnnnnnnnnnnnnnnnnnnnnnnnnnnnnnnnnnnnnnnnnnnnnnnnnnnnnnnnnnnnnnnnnnnnnnnnnnnnnnnnnnnnnnnnnnnnnnnnnnnnnnnnnnnnnnnnnnnnnnnnnnnnnnnnnnnnnnnnnnnnnnnnnnnnnnncgagtatgtacatgtagagtggtccactttctgactgaatcttagagcctcgtcacggcctgccctggcctattgccgctcccgctgttaggctgcccttgtggcgcacgactgcgaaacctctgtgacgcctcggcgaagtccaatacggcctcaaccgtcttcgccctcgagacggtgtctggattacctctctcaccttcagttgagcctcccagcagactcgacacgctgttcaacgcgtccccaaccctactccttaaaatcatccgcaaagctcgtagttttagacattccagcaacacatggctgaccgtctcctgcgcgccgtactcgcatcgatcatcgtcccggaagccaaatttcttggcgtacgtggataaccagttgtggcccgtgcgcagctaagtgagcaggtatactcggttcctgggcaagcttccgtacattttcctggtgtacctcgctggtagcgcgctgtccaccttccgtagatacgctcctttggtgcttgagttctactcctgctcctactgagcgtgaatcttgccgcggagaaaggcgttctctctcgttagcagcggccggaaaggatgggttttgcctggttgcgccgcttctttggcgagtcgatccgcggcctcgttcccggcgatttcacagtgtcctggcatctactgaagacggagggaaatatgccctgcttgaacctcggtggctgcttggaggattgcatggatgattcgttgccctgatctatttcttacgttctggattgcttgcaatgcggatctgctgtcgcagaggattgttgctgttgcttgcctttggtttctaaagattgcgcgttggtgagccagtttgaatatcatgctaaccgcgtagaagatccctattagttccgctatatgaaccgactaccgttctatcgaccccacttgcacctgttgcgaatctgttacctgatcattgtcgttgagggtgacgatggcggctcctagatgaccctcgcgcccggaggcgtccgagtagacgactatgtctgatgtgtcctttgcggacgccgccctttctctcgctgtgtctcggtcgggttccagctcaatctctgcgaaggcttcctttcgccacggtggtagcgggtgtgggtcaatgatttctagcttattgagcctgtcgatgtccatggttttcagcgcttctgctaacgggaagcgagcatacgatccgatattgtttctacggttctgggctctgaataacgcactccaaatgggatgatcgcggggtagagtgtgcagtctcgcgatcgtccgctacgcgcggtggcgaaggcgaaggtgtgtgggaagtatataggcttctacctctagggtcgcggttgctaccgtcctgaacgccgacaggattctgatcagcacgtttctctgaactgtgttcaagtgtcggatgtgaactttgtctctaagcgggtcatgctagaccgtcgatgcgtagtctactataggtgcgatacatgcctggtagagctgtcgtatctgctcagggcgcaagtgtcgtagtctacttaaggcgattgccgttttggtggcgcgcttgataacctgctggacatgctccttccagcgaagtcgttggtcgaataccacccctagtaatttggctgtaggcgatggcttgacgtcggtcccatcgaagatgatttgtccttctctgtgttctcccttctttcgggtgaggtggataagctcggtcttctccgctgcgaagcaggatccagttcgccgcgcccactcttcgatacgagggacatcttcagactgtatcttggacaaattttctggtactgaaccccccactctccatcggaagtagtcgtcaatgaatgccgacgcacctccctgggagtcgacgggctggtcgactaggtcggcgttgaagaatgcaaacaaaatgggggaaagtggtgatccttgagctagcccagcgttcaccagcggagcagtctcagtgcggaagtcgtcaaatccaatgttggcgtgccggtcgcttatgaagcttgcgatccattttctggccaccagcgggatccgtcttgcctgcagcgacgcatccaggcttgtcttatttactccgttgaaggcgcctttaaggtcgaaggcaattagggtcaccaccttgtgcttgtaccaggctttgtcaatcgcactggacagcactagcagggcttgctcggtggtcctacccggtcgtccgccgaactggctgtttggtagcaggccgtgtttctccgccagaaaggataaccgtcgggccatcactgcctccaggagtttgccaagtgtgttcaaaagtgagattgggcgataagcaccaggggccgagtaatccggcttgcctggtttccgtaagacgatgatcttcgcgctcctccactgtctcgggtggtgtcctagctctatacacactgcgaagatgctcacaataatggcctttagatgcttccaaagcttcttccagaccagcatcggtaagtgatcttccccgggtgcagtattccctttagctgctttcagtgatcgctcgatctccacttcagtaatcggatgccactgaagttccgtctccgttgcgctgggtgggctgatttcgggtgtattcatggtggggaagaacgcatccatgaatgccctcgctttgtctttattttgagtgcaatcctccgagcccactcgcagtgctgggatataaccctatgtctctcggggcttcatgtatgtcgcggccttccagagcttccctttaccagcttcgtctaggaactgcttccagtgcgaggacttggctttctcgatggtcctcgtccacgctcgtcgtttctgctgcatagcttcgaaggcagccgtggtgttagcgtgctctcttcccagctcggcgcagtttgcctgccacctcctacgcagttggttgacttcgacttgttgggtcttaagatctggcgtgaaccatcgcttggagtatggcgtcgggcgtgtgtcgggtgtgaaccggtcgaccgcctgggccgtcaccgctgtaaggttttccactacccggtcgagtgttggccgggtcttgatctgcttccatgggttcatctgtcggactacttcctcgccgatcctagtccagtccgcgcgctcatacgccttccttgctttggtgtttggcctgctccggagttgaaggttccattctggataggtggcacggtggtcggatccatagttttcgtgatacagatagcatttgatgagcaagtccgggttatctgtcaccgtctggtcaatggtcgagttctgtctagagttgttgaatgcccagtaagtcgccgtccctcgagggagacaactgtggaggttgtgggcttggaagaaatcgatcaggtcgctggcgtcttcaatgaatctaggagcgatatagttgttgccccacattggatcggctattgcagtgagcaccggcattgctgacgcgtcatcgaccgtaaagagcggtactggaggtatgtagacagaaaagaaaagagtttgagaagcggccgtccagatcttgatggctacgacatctgggtggttgcagggaatttgaaggtgtgaggaggtggagatccgtctgtttacgtagatgagactgcggaaccgaactgcatcgtcaatggaattcgaaatcagttttaactttaaactcttacaatttaattccctgaccctaagtggagacacgctaatctaattttagctcttccccggttgatccatgtagggctgtatgtattcactggtaaccacaatgggtcattgttatagtaatcgtgactaagcattcacctaggtgagccaaggcctaaacacaaaccaaggcctagacacaaaaacttcatgctttcaatttcagacctatttttcagctatcatactatctatatttacatatttaaagaactcatcatctacatcgagataatctctacctcctgatgcctcttctttttctttaagagcttggttggcccgaagccagtagtctcgaatccttgcatgcgcactctcgttgccaatgtccaattttgtttccttcgtacagcgtcgatgaaccctcgaattgcctgcaattgacgataatggggacttagaagcaccctttataacacgctttgattttttgacaggaattttgtggctttgcatctttttgatcgtctgctttgcaagggctaggtcttggatagcctgcttgccgccacgaattgcacggtttatatgcttttgaaccttcggaaggtctggctcgtcgttttcgaatatcgtttgaagcttattctcaatttttgagaacctttgatccgagttcggcggcgaattggtgactgagctaggaatttccgcctctggcgaaggtgtatgaccatagatctcaagcactggttcatcttcccagccaggatcaatttaatcacagacaatatttggattccaaggccaaataccagtatcatagaatgatgatttaatagttcgtgatttaaatgtgtctttgcgaactgttttgattaaccgaagaaaatgccgtttatcatcaacatctccaccccatcgtacgatctcattattcttctttcggaatttctgtttaaggaccgagaatggcttgccatcgagaggctggcatcgatgtgtcaatttcggtataaaccaccaaggtataatattaagggattggcaaaggtattcgaattccggggttccatgagagccatggttatccataaccaaaaccctaggtctacctttggtaactcgctttttggtggtataatggaaatccaatagccattgaatcgcagttttatcgtccgtccagcctttagcagttggtttaataaccctataattggaagggtcattatcgccgtcgaaccaatcttccatttgttcagaaccacacattaaagatcatagatgtataacccagccatcggctgaaatgcattcaataccagtgatattctggcctattccaccggtcgcaatagtctcattttcacgggtagaagcgacgttttccttagttccaacgcctagctgaaagccagtttcatcccagttatatagttcgtgggcctgaattttgttctttttaaggaattggccaaagaccttataccaatgaactaattcaccgtgtaattcggcctcgattctcgctttttccataggcttttgtgtacggagagtgatatacggtggtaggcgcgcgataaattggtagccatacattttactaacctgccggtcggaaccgcagtgctgtaaaatgcgatttgcagcgccctcaatatctaaagcagtcggtggtgtatatactgaattaagcagctcaatgcagcgaatcagggatctctcttgcgactgatttagtgctttgttggtggctgtacggccttttttactaggcgtgccgttacttcgattccgaagcttccactttgagatgccaaaatgagaggctgcggcctgaatactcttgaattggcctaatttataggcatcgacggcatctgagagaagaatctcttctttttcggacgaaattggcatagttttggtggtaaaaagtaaggacaaaaattgaaggttgaagtttttgtgtttaggcattggtttgtgtttaggccttggctcacctacacgcgggacgggtgtaggtgaatgcttagtcacgattaccgtaatttctttagaaaccgatggaatccatcgtgcaaacatatcaaacaaaaagagaatctggcaaaatcttctttcattctctcatgtcttggtctatttgtcacgcgcagccttctctttcgcatctaaaagaaggctgtaatgacgccagagagaaatcatcctggtacgcaacttgtttctctacagctttggcctctgttatccactgcgattctcattcgttaccaagtcctaaggaaatccgtcacttggggaagttgacatggaccctcccaggactgccatcgtactgtagagatgacacagagcccatattaatcttgttcaaaagtcgcgatttaattgttttaagacgtctatctccctgtgccgttcatcatagaatgaaaagtactccggtactgcgcgacgtggcgaagagtaattcgtgtcaatgttgtcggcagtatgagaaccatgtattggtcagattcccgcgctcgtgttagatggtgattggcagctattaacgtggctgggtctcgaccgtttcgaccaagcctaggagaacagcacgcacatttgagatgtgttcgatggggatagggtggagatgatcctgcactcttacatctggtcatcaagtcagcagtataagactttcggccattgaagatttatctccgtgctttctcagtaggatattcaaagagatacttcacaagctgcatttttacaatgtctggtaagtatgtcatctggccgcagccgatgtatttgggcgtattattaacttccatagcttccgaaacgtcacctgataggcgtccagacccagaatctttaggcaggtgcaccgttgcagagattttaggaagtccatctctcgaggcctccctcaaaagactcgatcttaagaccggccggggtcccgaatttgtggataccgaagctaaggttgcgagtctggttgggaaactgcaagacttacctaccaacccgccgtctctttatattgatcttgaaggggtcaatctctcaagacacggtagcatttcggtccttcaaatctacgttcttccgcttgacgaaacctatctggtcgatatatacactctcaaggagaaggctttcttgcagccggcttctaacaatgaccagaccctactaggtatattggaatcaccatgtatctctaaggtcttcttcgatgtccgaaacgactcagatgcactatttaatcatttcaatgtcaaacttgccggggttattgatcttcaattgatggaattggcaacccggtattactcgaagaaatacgtcagcggactggcaaaatgcatcgatagggatgctcctctcacgactgatgaaatgcgaacttggaaggcatcaaaggaaaaagggctgaagctcttcgctccagagcgtgggggcagctatgatgtgttcaacgtccgccctcttccagatgatatcaaggaatattgtgtgcaagacgttcaattcctacctaagctatgggtccagtaccaggggaagatatcgtcgtcttggaccaaaagggttatgacggagagcgctaatagagtaatgctctctcaaacagccacatacgacggaaagggaaaagataaagctctagcgcctgtaggctggtggtgattctgcgattgctgctatggtctttcctactatttggtcggacaagtttggctacatccattctagttttagcggagtctgcttgattgaaaggtacaaattgcacacgaatacgtttttcgtcaaagcgaaaagggcagcaggagatggcgcgcccaaagaaacgctgagcaactatacatagaaccgggctctcaagtctgcgggataagagattcatgcaccttggctggtccgttctctgccgagtagcatttattggttgccggggaaacagggcaacgaggagtgcgtagtgacgtcaagtactggaaatcggctgagttgtaagagcagggtgaaaaaattatcgctggtagacttggggggtggcagggtataaggaaatgcacggacatcagagcaagtggagacaaataatactcgaacaaagaaaacattcaccaagaacttatttcacgtttgacatgcgcataaaggacaaggaccgtaaacactaacactgccgtcaacagctcttgacttcctatttactcaacgtttatcgagttcgtcgtgtgcaatggtcaacacacgtccaggatcaaccaatccacccgagttccacgatgacatttcttgaagggcatccgtttcctccctctactatggcgagagctcaaacacgttgaattggcctctcaaggccatcgaaaatgagcggcctctcaattcttcaatgccgctgcacttaactgcgtttgcccgccttgttccggtttaacccagctagctgtttttctgattaaactacgatatgctgagttagggagctagattcaatcattgctcctaggatcatgctcacggcctctgggagctaaatgtcctccaggaactgtacctgtcactcctgggagcgagacagatcgttcctgggctctccaccttggatcctggagccactcccgtccgttcacagggagcgttgattacttctgggagcaattgttccgctgcccgaaattattgcccgctttttagatcccgcttattatctcacaagtgagactcacattcctatatcatatctggccgcaagatccatagtatggttcctaggtacgctcatggtcgctcctagggattagattcatacttcctaggggatctacagctcccgggagtggataatagcttcggggaactagagtgggttccctgggctttaacgtttagcacgatcggtgccgtgggattagtggggtcacccacacttttccatctggtcctggccccctgagtacgattcccgggatcacgagagctccccggaattaacaaatgattcccagaggtagggcattaggaatctaggaatacaaatctagatactaggagcaactagggctaggaataattcgtgtctttccaggaacttgcatagagaaggtgacttgcgtagggacacactggagagtagggacacactggagagtagggacacactggagagtagggacacaccggagagtaaggacacactggaaaaatccgggtggggcaatgagcgcgacactaaaatttgtgtcgcgcctgctgaagagcacaggcgacacagaaagcgacacgtcatatgaactggctcttcgtaccacttctcttctagtccaataatcctatgcctagataagtattgagataatccaaaggcgatcaagctcttctggcagggcattccatttttggactagtgttactctgaactccggaaacagagacgctaagtgtttcacgttacatagttcgtcgacgaatgataagattgttgacaaacagacagcaatcaaaacagactagctatagtatatagaaattataggggagactaaactcacaggatttcaatctcgtgaagagcgtagtcagaaggttttgagccactacagtcactgggctgtcgcggccgtcagtcaatggacctggagcccagctagacctaaagctgtggacgtacgtccagcttggactcaaatccacagcccgaagtacttggccccagatcggctgctctgggcccttgtctatggaaccacagccctcccactatagctcctcggcattggacgtgcgtcactggaccactggcttgcccagatagtggccccaaaaccgcagtcattgttcctaaggctatggcctatagtcctaggtggctcacgagccacggaccatgggccagctgggctcagtatctatcaaccggcgacttggttggattactaacctggatggcctggtatcgagtactaatatgttatactaaatacctctggccaatagtcggccacctctagccactttgtcccgggttactttaagtttctgcccgaggttcatagatattgtcgcccttcctctctttatcgggtctagctcagacggacctgatctagtatacattcaaaacacacctgacgctccctgatttagaaactttttggtttctttattctcagtctgttgattaccactctcccgaaatccagggccttctcaacggcttcttggtgaatacagtgaaagaactggcgtgtttattgaaactattggccaaacagcagccccacaccacgcccatttcctaatacccaggcaacccccaagtctactacaggaatcatttcagcctgtttcagtgatatacatgaagcatacaggatgtttggagatatgatctgcgggacccacatggtgcatatcggttcccctggacgcgaggaagctatctttcttttgcttccacgcgctacgtcttgtatctagagtcgactacagctttatttaatattgattactgatctgaatacgctgtccccatctacggatacgttcagcattatggaatccgacgcgagtccagtgtgtagtaaggacagccaactactcgaggctagagagcagtgctagaactacgccaccgtaatttatggactatcaaatgctgtaacttcttgattggacgccgttcgggtgctctcttcccctctgttctcgactaagcactaacgttctggcacgccagctcacttatgagttggcagttagtaccctatgccggctacccagggactggccctcccctctcccaagctgcttttgaggtataaatccaaactcttaatcccgttttcttttcttggctgacttaaaaccaaaaccctcgcatatcagttcttcacaacaacttaattcagccatggccccacaagcattttactatgcggtttataaaggtcgtgttgacaggcctgctatatattgttcttggtaaatgagatcaaatccggaaaagtggcgcttttttcgctgatgttctatctgtctaggagccaagtgcatccaagagtgacaggatgcgaaggcgctgatcatgaaaagttgaaaacactcgaggccgcctgcaatggaatgttccaaagaggaatcaaagattttgatatgcccatcaaaaattccgccaaacgagataccatgccagtgaatatgggcaaacattgggctgtagctggtggcagggctactggcattttcaccgattggaaggaagtttcattcctttcgtatgcaaagtcaatatctaattagaataggagtgcagaaaaagccatcaaaggaacaaaagcctgccatgaggcttttagctcccaagaagaagcagaagattttattgcaagttggaaagatgccttcgctgacgtatcgcgactggccatcagacaagcattagagaatagatggaagcctcgtaatatgaagtttaatgttgagtcatttttaattagagacaatgagaatatgatggggaaaaacgacaaagagatcaagttgtgtgggattgaaaaagaggaaaacctttttaaactttgaaaagttggctatcaaagaagaacataggatatgaagcttcgtctactggaccctggatctacaatcaatctattgatacgttctgaattgcacccgaatatacaaaccaatgctctctgaagtttgtaaaagtttgcatcatatcacgattccgcacctatacaagtctcttgtttttaccacccgggagttgtcactgtcaagcctgtgcatgcagatagagtctgtcgaatgggacctgagatacacgcgggaactaggatttcgagctccagttcatcaccggagggcaagccgttgtgttcactttgacgatggaatgggtgaacttcctacaaattccacaacactatgtcggaaaagcgaaagcagacgtctgagtcaaggtgtaaagcctcgctattgttcgctcttgggtggggtcgtggacgagacattgggcgcggaccgctccgtcgtcagcttaaagcctcggccataacgatccttgaattccgataaaggttgatcttgcaagacgaaggcttgcatcttgccctgctgaaggcgagcccctatgatcggtgttcgcaaaattcaccctggtcatattctttgacaactgttgaagcggtgcatcactaagatggcccccaacttgccttgtcctccatcccagcccacgatttctgccatgaattattttctcattggtagagaccataaattgaatggcgtcgccagtggcataattatcgatcgtactagcattttcgtccaaatgggtcccagccttcgagcagatatgcatgcattgacgagttgtctcccactcttcttgtaacctgagcagttttgcaatgtcctcctgagaggctgttaaggttgatgtcagtgagcgaatgggtttgaagcagcaaaggctttgttctttaattcagagccacggagcagaatccctgtgatgcatagaactgaattttatgactacatgatgcaatactgtacaccgttgacgagtacagtacgtctcactcttcgattattcctcgaaccttgatgccaatatccactggactatattaagagtaaaactaggacgtaggaaaatcattaatatacaacacctttacctggtagattgagtgtgcaagggtggttccagtcatcgattaagctagtcaatcgatctcgagatgactccagtgcctgctcgaagaagcgcaatcgagacagttgcttgtcgtggcgaagctgaagaccttccctctgtgctctcagctgcataccagtctgcttcaaaagaacgttatcccgctctagcttctcgccatcaatgtgcttggacacgcatgactcccagaggcgttgatagagtccaacgagtcgagctagaaaggctaacttgggatcgtcgcgttcgaggtttgctagcaccttcgaaatggcctgaaagggctcagtcgccaaggtaggtcttctttctgtttcctgctgtgaaggggggaactgcgatagtcagcaagaatacttcaagccgaatcttttcacctaccaatggagggacctggcaagaagtttccggcgagttgtttttatcgtttaagattggcaattcactgggcccctgaacaccttccatttcctggtctcgcgagttattcggggcatccattctgcctaggggagaatgtcaaagatctgggcaatgccacctctacgaattctccatgtgtcttatagactagcagacgcaggtggttctggcctgggtttaccggtcaccacattagtcaaccaacgaagtcagcatgtgaatttttattattatttccagcacgcgattggtaattgggagtcaatttgatagaggcagactgatcaacgagtcgcccggggagatttgatcaagcttcacgatgttgagggtatccgaacgcttattgaggaaatatctaatctatttcaaagatacctccactttcgttgaaagtctcaggaaattgataaacaaaacattgtagaattgacagccatcaaaggaaactatgaccccaatatgtcttgatggtcacaagttcaaagaatcgaaggtatggccaagcttcaacgggttgacgggccgagcaccggcacacccgaccgtgacctcgctttccgcggtcgagacagctcaacaccaacacaacacgaaatcgaggctagggaaaaaaattcatagtttcaagtgacgaaattgtaggcgcttttcggtgagttgacattccgtttctcgataacgtgaacagaataagaaatacgagcctgttaatacggattgaatatcgtccagaaatcattagtacaagactgccgtgaaggattcaacaatcagtcaacgtttcttggccggcttagcatccctttttccgaaaaccactcttactcgtctctctcgctgagcgtctaaaagcatcaaagatgccgctgcaaatacttgcagtaaaagaagacataggctttgattggccttacgctttctaccaataagagcacttacgcaataggatgagccgagaaggctataagtacgtcttctgtccatggaattttgatctatcgtcgattcacttgactctgcaaaatcgagcaggcttatgtctgaggtatctgataattcctcacactttgactcagtataaaagttcgtattgtactaacatttataggatatatcgtgtaccagcaagtcagacggtatctgtgagcgatgatttctagcagataatttgccaaccagccagccgatcaacgagacaagacaaagcaggctggtcaacggtctatgagcagccgactgagctgatctacagtagctcttctgtgtatccccaagataaaagctcaaatattcacgtcccaggtaagtaattttgagcccgacctatcggaaattcttcttatcctacaaacaatgcgatttgaatagaaccgaggacattcaaccacaatgtacgagcgcaagaaccacggttctttgccgtctcttcatccctggacccgagcaccagaatatgtgagtgatgaattatctacaaactaataaattgcagcgagccattggtaccagtatgacccccgaggatacaacacccgtgttattgctctgcactaaccatggtctacacccccgtcctggtcccgtcgctatcaatcgagcaggacacctaggcaaggtttatagaaatcaaaggagcgggccaataacaggatacgaacattttattgcgagtttcgcgttatagaagcttgagacgtctattctgccggtaaggtaagtgatttatcgtgccttttactgggccatatctatttatttgtgcaaacttttatggtgccaaacacgaatccaattactgattttcggtatatataggagcagcctatcatcgtccgtaaacatccttggggtcctattgccctcgatcctactgccttcataccataaacggcggagtggataaacctctttctggccgttagcatcgcgaggtcttctctcatcacaaatgcacagtttcctgttacatgggggcttgccacgcgcctttggcgtctcagaagttgcccggtgcccccagtacaggtttatcgaagcggtaaccggagagtgcgatgcacatgaatccaacacggcataaattgtgactgcattgccggggagggctatatgctctagtcggtaggccgataggatcacaaggctaattgatgtcccattcgtaagcgtacactctacggagcttataaacaggtaagtcgtgacaactcgtccaagtgattcaagccttgctaactcagatcgtataaccgaggcacaggcaaaccaataagagagcccactacccaagaatcacctcggatatctccaagctgtataatgagggatttaaatagtatcatggtgtatcctgctggatagatggttggtagatttgactcttaggtgcgcattttctatcccaaccgaagcaatatgtgcagagaccattgaccctagctgtcactgcagcaggctagttacgttgaccgcgtttatattttgtctattgatatcgtcttctaaacatatcacgcctaagcaactgtggctaggaaagcgctggattctctacgtcccctctctcgagtattcactcatacaaaacagatcatgaagataatttgtaggtcttcgcttcttctagtactgtcaaatactcaaattctctccccgtttcaaacactctctgctccattccttcatatggtactgatttgtagcagtacctcacggcgtcatcttcacagtcccctcgtatcgtccgattgaactttcagatcgctgcaacaaaatgtatcagaatcaagatcactactgcagctccaaaggcggcttggccaacagctccatagtacatgacgacgtagtacggaaacgaaccatctctgtcaagaagttcaaatgaggattggagaccgtgaatgccacctgcaacacagcctcctattgtcacaacaggcaagctcaggagaaatgacatacagccatagtagactcgagccttgcaatcttcctgtatccatcgggggtggaccaaaataagtataccaaaaatggaaagcattgctgagataagggccgtgataaccatggtaatgagagtgtcgctcataagcttctggagtgtgatgtccagcatgaaatagttggcgttggcgaggtcagattttgcgcggttttgcaggacgtccgcgaagtgtgctaacgctgagctgagagtggcaagtcccagccaggtgacagtaaggaaagaaacgatcagtcgtatccggaccacgccattagtgaaaatagaaggcattgttcacagaaacggtatctctgatttcaaaaaagtgatttggggcttgtgctggcaagttcttgaataatgagagaatggaagcaaaaaataaagtggtcaatatctccggacacaggcaatctatttatactttccagtatatacagtgctctgtgcatacgaagcttgtctattcaataaaagacatagtcgatcctcagctgtatcaagcgccctttgcattgtccgctgcctaagtggcaatctgcataggtttctccgagatatacgttctgcgacttacattgctatcccttcttggccggtcgctttgcgaacggttttcagcctctcaaataaaacaaagctcctaggaccgcccgtgaattctgtcagggatatacgtgaagcatgtaggtaaaatagagatatgatctgtatgacgagatagtatacgtaattatagagcagcctacggcaccgggtattgccactctttcttttccttctataccaagtaacctcttctctgaagacgaagtcgtgttatcccacgagactttggtccatcattatggatatttcagccctgccccgacaaatgccaattttttacaattgggccggaagcgactcgactaatatagcgtatataattctcagattcatacaaagtacaagaatatactttttatatgcctctccacgcgtacaaagccaagtaccacagtattcctacttagaatgggttgctcaccaatataggcaacccctagggcgggcaatcacgagccgagtccgaatatctcggatgctatctctatcgctgttatattccaggctacagtattcaagattcatctttcgttttgtcttgccacttgcacatttctagttggcgtcaaatatgaaagcatggttgggagggtggctaccagacgtgaggcctgttgatatctctggattataattctactggcttcaacaaagtgggttattgtaaagaaacgttgatagaccggaggacccaatttcggctcaacgtccacacttccaaacaccaatagatgatatgaggttcggtcaagttggcgtaattaaaaagcagtttcttcgtagacggggtcgccagatagcgcgaaaaggccgggaaaatacgtactgtatggttagagaagacatacagaatatctccttcaacaaccgttcagttcgggaattttttgttgttcaacagttatcaaatggggaggccgataatgaccgcgacaacgtttagttgtcacaacggtcaccacagaatgaaaatcgcacatttttcttcgggcttctctttaatggtcactcggatttcacgtcattggtgagcagagggtgctacgaacaatagacagattgaccaaagaaatgaattggtggtcacaagctcgatgttgaaagtggatgttcaacgaggtctctaacatctgtcgggccattgaattgcgtttgtgccacctttataaagacgttgaagtagccctttggatctggctagcatataagagagactgtcctgtaagaagtatattgttagaaccctgaatctttgcaaacggataggatggatgccccaaatgaactaccgggccaagatagagcagaccgtcagccaagtgaaatgcctatccgaagtgatgaggcctactcaggagctatttccgattccgaaacccaaatggtaagctacgtgcaataatacgttctatactttggctgaccaccgcattccttcgcaatagcaggaagcaggcccgaagaaacccttgacgatcgagtactttcaacctatattggagacactagccgatcttgatcgccacgatccaaaactcgcctttcaagcggctcgagctgtgggactctatcgacgtgtatgggcttcgtgtgagcccagtggccacggtggtgagaaagtagatcagaaaagagggattttgggggaagcccctatcaaattaggcaacgagcaagacggtctccaacttcgtcctaatgagcagctatgttttctggattcctttgaacgggctctggagcaaactcaagaacgactagtcagcgtgctcaaggaatggaatcaagtcttgagaagtgatctggccgtaatgatagataccgacagatacgcctgagaggctgccagcggaggagtgtcatgtcgacttcagagctattgaatatatcactggaaacaggaaccctggaaataaaacagctcgtatttaactataaaataagctaaatgggtgtgttttccccggtatggctgcctctttggccaacacatcggcggtgtcgttccggggcatttcacaatgtccaggtatccactgtagtcgaatcgacgtgccgtgtgtcttgattataccggcttctttccctataccaaagaagtggagcgccaatggtgaattgatcgatgtaacctatatagaagtgccctacgcgttcgcgttcgtgggtctcaaagcgtaacgcgaggttcaataaaatactgcactgggtcaatttgtggttcgaatcatttcaacaccaagggccaagcggtcttcaccgagccccgccgatccgactcgcaatttcggaggccaaagaggtatgaggtagaatgcgatctactcaagatactcacaacatttacatacattcaacaatacggatccatccaattggtaacggtgaaactgcaaaactttctgtccaggtagcggctccaggagccagctggcggatcctgggagcagggcgcctattctgagtaccttgcgtatacgtagatgaagagtgcttcaatactgaagaacgctatactcaactctcagtacagaacgtaggggcttcctcacattcagggaatcccagatgcgccatatgggtccacccatcgttgatcctcaactcattttgcctcatgtatagctgactcggtgaaacttaacccagcttttgtgttagtgatttctataaatgaagtgttctcgcccatgtcttgcacagtataaggcagcatcgtcgtatccaaaatccaattatcgccagagcaagtccaaaaagagattgcattatctcgttactaggtatcttcgaatcttacagcacagagacccagctcggaactccaactaatgcttttttgccatagaagatgtctcctgattacgatgttgcctttgagccatggaccatattttcggctgcgtcagtgaagcagtgttgcttagcctttgcagaggtgatcaagggactgccgcaaaatcaagtggcaaaggtcaacttcaacttccgcggcatttgcaatttacatagcactcgggcagcgaaggaaggagagaatgtatttgtgctgatttcggggaaggaggtagttttgaaggatgcgtttattgtcaacatatgcgcattgagccgggcattagtcatttacaaggcggcggcgcaggccgatcattttcgctcaagggtatcggtcgaaaagtgggtatcggtcgaaaagtgggtaccggccggatttccagctgcggtagatcgactcgatgatttttttgaggatgtcaacaatcttcattgtgacagagaggcgctgtataatggggtcgtgaacattcttatgggtttgccttgactcatttattgcttgatggcatcgtctcagttccaaactacctcacactgtcccacaatgattgctttgattcaatttgatttgttcctcgcgcttttcgcagccttgccctcagctttgtgcgctgtaaacttcggtacatacaccgcattggtggatcccataatacgacagtgttgtcagacggcagtattcgcaaacacagatggtcaacggtggtgatctcagacagtggtgcgctagtcgacaattgtaaaagtcctttacgtgtactctcgtattgctactcctgagagccagtgtcgattaatttgacccttggaaacagaaaggggagtttacctttccaaaatgaaggctgccattccagtccacaatattcaaagcccgcgacgtaccctcttgtcgttctatgccacgtatcgcgcatacagctcggaggaaatcgccggttctctacgttccctgccttgaccgtccgttcagaatcaatcaataatcatcaatcacaccgcactgcggaggataaaggtggccttggtatccgagacaatatcggacccgtatgattgtgggacgtcttggactagctcgtacatcctgcactgaatctcccccgtcagtcaacgctcatgggatggctgctgccgaaaggatggttggagtcatgcctgctgcgaccaagcgaactagcactcgcgaggatatcaccccacgaaaggtcgttctaagcgatgataatatagatttctctatccggtctgataccagatacctgatagccctttctggaccccagtcagacctcaaccgtgatcccttaccaacagaacatggttgattgcatgaactcgggtacgcctcacagaaagcaacggccgccgttatgatggtggtagtggacgttgatttaaggaggattggtggggatagggtttatacttactgaggtatcggagaagaagccgatcaggtattcttaattgcatgcttgttcaaggtcttggtgatagggtggtccgtgtggtcagactactttgactcgcgacatgctcttgagaaataagcattctaatgtagggtaggttcaagtaatgcttgaagtcatgactttgactgtgtgagtcacaaggcctactgtaccgcattgctagtctaactcaagcgaactagaaatgactgatgcaattatgtcggtgcaaattgatgtgtggatgagatggcaaaactccgcgcacgcgcgggcgggcccgcttacaaagaagcacttcggccgcttggacttttcatactacttgggcttacagctgatcgattgttggaatgggaccgctaatttagcgtgaaggaaaatatattaatccgtgtcaatccgcttttcgaccatctatctactcagagcggtcttggcaaatgtcgagatctctctttaaactaggatatcttcatagcttataatagacgttcataaagaccctgtaaccatcatgtatagtcttatctttatggaataattagttattgggtcggaagctgttatgctgggttcaaaagaatcccggcattcgctgatgtctgacattcactgatctctcggaattcggattaatatattcctccgtgccaagaggcgctacaaattggcggtcccatttcaacattcgatcagcttgccgatactacttttgaattttttaaccacgtaaatgtcagagaatgacatatattcaaatgatttgactaaaattatatataatgaatatattcggcttaagtggaaatcaataagggagaatttataaattgaattgtgattcaagatacatgaaagcagttaatcctcgcgcatcaagtgtatatatataatcgcaaaacttattgaacctacgaattctcacacaatatactgtctacctatcgaatggatagaactattacggaaatgacatatccaatacactatatagaaggatacaccttcattctaatcaattacctaccacattagtggttattgctggcagatgacagttgatgacgacgtaattaaccggatagatttccaaagttgaacgccctgtttaagaaacttacataattcgatggattccgattcccgccgtgaggtattctccttcaccgaccactcacgcactcaccacagcactcaccacagcactcaccacagcactcaccacagcactcatcacagcactcaatacagcactcaccacagcactcaccacagcactcaccacaacagcgtatctcaacactcaccacaacactcaccacaacactcaccacaacactcaccacactcaccacactcaccacactcaccacactcaccacactcaccacactactcaccacaacgctcaccgtaacacttatatccctggctactctataccttaatggctgataccgcaatcaatggcggcggaggaactccatcggatcataaaacaccacagcacaaggaaggggaatacagcacccgatgaggaagaactttcagttgtcaatgctacgatcttgatgattgaatttgcgagatctatccaaattccattagatctttctaatgataatttcttcggaaaacgagactgtaaattgctagaggccttgttctaatatagccccaaacccgggacgattgtgattccttcggcggagactggatggacagccatatgaagattgcagctaccaagcctcatgatctggcttctcgtcgatcgtcactcccctcgcgagagtatggcgctactgtcacactctgatgttaccaggcctctctgtttctggtccatagaatgttctagaagctggggatctcccgcatccacttttccaatcgatatattcttttcgaacccgacgcttcctctctgcatctgctctaccccgatcactagtccgataaccccagtaaatagctcttaagaatctatctcaacttcggacgcaccatatgggctaaccgaaatatagtctgccgattttgcactagaagccgggaaactgattggctcccgagattgtagctcaaatcctaattattctggacgatcgcgtccccttaccgaccgagggtttccgtggttcatcgaaactcgttttttaagatggtggggttcaatagcggatcgacagccccggtcttcattcgacggtcgttatagaccaagatttattggtcctaccattcttgtgttcgcgcttcacaactagggcgtggatcggaactcaatgtgtcagcccctgtacgatagatcactctgcttccaacacacgtatccacttaaatccatctagatccttagaaatctagcatattttctcgagctgataagagtctcgagcatcttaaagagccccggaccaccatgtcatgatctcatttctaggacagcactacgatcctcaacccattactttgaatacccctcagtgctgtttcaatcccaagaaagtgtgattgttcatattccagaagaatatgtatgaagctgtacatacaaccaggaccaatccctcatgctacgcctttattgctgagctgttgaaccccgcccctcgtaatcacataaatcaagctagtttattggaataggttgacaatctgctttaaatcaccgtaacctgtatgccactagaatgctgctcgcattttgtccactggtatctcagcttcctggctgcacagacacgatgtacatagtcccaattacaggatgacgatcgtgttcctggaggccggtaataaaccggtactagtgtcatgcgacctgcaacaaggtctcagcttgccatgagcgaagaatatataatgggtatttcatacctggtctggagcttttcgtttgagttgattcactgccgcgggtatggctaggctcaaccgttgggaccgtttgaagccatttatcaacgcttccttgggcagtatttgtgtctggaagagactctagtgaagccatatcacccaccgagcgatgaatggctcctgatcgttttctgttgcctcgatgttctggagatccggcactagtgcgacggcgcttccgcagaatatggtacttcttccctcgtagagattcaacggttcggactacccggtattgttcataatacgcgtgggaacgggctttccacgagagcgcccgatgggcatccagccaggggagaagatttttctcctcccattctggccagcccattgcgctacgtggggacattatgggggtcggaaaagtggtagtagtggtaagaaacgggtgaacacaacagcagaatgcgaacttgcagatacaggtctgttgggagtatccaatattaagtcaactatgaaacctcccaccgttacatcggaaaataaccattgcgtgattatgagccatggctcagcctggtgggctggtcttggactctcatctcactattcgcactgatcatgtttctagagaccgacaagccctcaattgttgaagtatcgttggatggtggcccctgagaatcaacgacgttgaaatgacaacagcaatgggagaccctctttgtgaacgatttcaccattgtattgaaaatatactcgttgagactgtccttccgttgaagttttttttttacaaatgatgatccttccgttcatgatctagagccgctgatattctattttgactagcaatatgggaaatcaggggcgaaatataatggcctcaacggtgaaagctctgatcatctggcgagtgattttttgaggttcgaatgtggaaaatagacctgacaaattctaattataggcaacaaatcatttcaatttcaacgatacaactctataaatacttgcgcctttcccccattgtattgaattagattcaggttcactcttgcctcagtgtgactcggccgcaggtatgaagggaattcgaaaagtcccgtacactgatcgaggaaattttcggagccgattgcaacgtgcattatcgttgtcttcctccgactctgaggacactcgcagtccgtcaaggtccgtggcaggcgataccacagaggatgagccttctttcccggaggaaaacgactacggcggcgatcaggaaaacagcaacccagctgagccagaaatggtgagcatggacaaaacggatttagaggatcctggacagattctgttctctggggatagcaacacagttgctctcgaatgtgtggcggagtaagtatagacctcatcacagaacatgactatgtgatttgcctgctgacaatttctagactcaatacccgattgaagtcagttgcgattcacccccgagtgagaacaagaagcgctgatcgtctatataggtccattgagagctcctcgtatgatcaaagcacctggaatcaaaccgttcgtgacgatttggctggcatctttgctcgattggcgatcgtggagactaatattgggaaggtgcttgaagagcgtccaaaaaaagttacagtggaccagaagagcgggcggtcgcttcgtcgccagcaatgattcgaatgaagctgtacttatttattccattatgttcaccagagcaacatactgtaccttttcttcaatactttctacacccccaggcaatctgaaacctggaaatcccaggataatataaaggcctctgtgactctcattttacttacctacacacgacaccaaatcaatcgggtatggaatactggacacgggacacagcacataagaaatctttgaacttcaagctgctacaagtcgtctgaagataaggaaattgcgtttctccatgggccactatatttagacgagggaatacacctttctcctcagttcaagtattgcaggtcatctgcatggttagtccaccaggctcccacttggatctgcgcaatcaaaaacattcccaagaaatatcaatctagagtataagaaaatgacgaaggagcttgaagcaagtgggcttctacagaagatgacggaaattgacagtattcacagttcggaactattacccttagtatagcataacgataatattgcgtaagtacctttccatgaacaatttgcgcgttggctacattgaaacacattttatccgcataaaatacaggccaggaatttcaacgcagattctttttagaaaagagattgatcttgattggccgcaaacggctcctggtgactagggagcgggccattcgattcggagaggccgaggtgtacttcgtggctctcagtagtgaggccccgctgctccggccagtctgcgtgaattacaccggagcctggcaaataggatgccagtcgtctgttttggagggcatcgattgtattccaaaatcgagtggtcattgctaccatgtccccgtgtgcctgatccaacactagctggatatcattccacgggatcaagtcttgcagagcggtatttgtggactccagctgctgctgcaacttacagatctcttgcccaacccgctgactatcagctaatgcctcgttccttactgtgatagctagctgcaatttggaagtttcttcggccttctccgcttcaagttgttccagcaactgacaatgcttgtgtctctccccgtccctctcctcctgtgctttttgaatctcttcctcaatgctgctcaccatccgaagacattttctatgggtctctttatcatgttttggtcgaggcctttttgtgatgggggatacctagcattgtgagtagagagtacatcaagacatgccgccagggtagtgctggacatggcaagttcagaggatatagacagaaggtagcgatcgggtaccggatgcttgcgcaacccaatcgcatgtttgagagggttccgatcatctttggacccagagatagcagaccgatgggaattacacaaaggtgcagtagcacgatactgtccttcgtccgacctatggcctgtctttctctgagaaggcttggtctttgccatgcttggcatgtaagatcctctaatggacaatggcccaaaggggatggaaagggtgaaataaatataggtagtgactatcgagaagctgatattatataggaatacggacaggcccaggcccaagacttgaagctacggttttactcctgcccaacagctgtgccagaattaggaacagaaaatcaaaatgttgagtactgggcatgagcgcgaacgcgcagaaaccctactacgttattatgaagtatgtgagcaagaggtaagcacaatcatgtacgttgatgcaaacaacgctatctcgtgatagaatggtttaatcggcctgatgtaccaccaaaaagaccaacggctcaatattattatcaaaaaaaaaaaaattgtgagtgttgcccacgttaacgactctgtaaattgagcctaagaaatggcggcgttctttcacaaatgtcccaattccggaattcatgtccgcagatatatggatctttaagaagcagttacttgaggtgagatctgattgacaagtattattgatcattgcgcccttgtcactggcgcaactataaagaaatttcgtactagtatgagtatttatcaagtgtcccaccgatatagatataactaagggacaagaatccccaatgctgccgatcaaacgacaagtccggtacagacccgaaataccataaaagtgcgatgggaactcgaagatatgtcacgagataatcatagacctcttttcatatttgataggcgatcaggggtgtagctacgaggctagtgaagttgatggaatataagtcgtatgtgaatcgagatagcagagcatcgaacgctgaccggtgatcattttacttggcttttcgaggagaaagcgcaatgtctgatctagaaattgacaggtccaattttatcattgactagaaatttccaatataacatggtgatcacaatttataacgtaagtcactgaagccaccggtgcatactatagttatcctgataatctacaacgttattggcctcggcatatattgcgttcgtcaagcacccggcttgagactcctattactcattcgctggcagcccctttcgtaatctattagaacatcttcattgctacaagatcggtaacattttgaatctagatgagtctcgtatcaagatgtagcgcgtactacgggaggcatgcacgcaatgcggctcgcagcgcatttccgtgatctatcgcgttctctctagtccagctcagacctcgctcgctaccgcatctgaggattggctgtcgcgggtatcacatgtgatctccaatccttcagcatgtaacgacctcaatgtcagtattgctccggcgatgccgctagctcgtcaagcaggttcttattttgcgagctaagagtttgtatttcgtggcggagttcatttaactagtgcccgaccctgagttccggcggaataacaaatatccgaagagcatgtgactctagatgtcgaaactcacttccagactacaattagttccgatgagactaactgatagaaaccatatatatggcaagcgcactgatgaagtcacaatggtaaaattctctagctaatcaaaaacaacaacgatctagttttgacaatctggtcagacataatcaggaatcaaatgcataatacacaagtcacatatttcatcggtaaaaagaaagtatcattatcatcctgtttcttgacactatctctgaaatatacatatagcttcacatcgcaaaataccaacagctcacttttgtatccttatgtctcgttacgggatatatataatgcaagcaaaattccccagtccagaagcataagagcatatgctgccaccagtaggacctcaatcaagcttgatttctcagcatcactttggcggtgaaggtgggacgcccggcttcttgacgcctgtagtatcgtatacgccgcgtctataaagctcagcttagcttagtcggaaatcccagtcatagaaccaacttaggacgaatcatagctggcccctgcgcttttcaagcgagatgtaaggattgatctctctatagacgaaaccaagttagcttagatgtaaagatagagctcgcggatctgtatacccgagtccgattatgaagcaatgggaggctgtagagtgcacataaaataagaataaaccaattcacagggagcattataaaagctagccctatggtatccatatagtaaaagctagggagacggcggatgaaaagatttcttttctatagtgatctcttatatgacctatatatgacttcgccgaattagtcgcgatattccaggggctatgttcttcagtgaacgcacacgcatgttgttgcaaaagagactattgccacgatgaagcttcggtaccaggccgaccagttcatcgggttgtcgggatcattggactcccaagtgatctcaaagcttggggcccgcgtggtaagacgagatacagcatgttcaacgtcctcgaagccatctaggtcgtccatcatcaaagtgcaaagggtgcgttaaagacgacttgtggtggggtttctattattataagaaaaactccatttcttttttttgtggtttttatcttatttcatttaattttgccagagctcaggacagtctggatgcgtcggcctggtgctagctaccggtaaccgccatgcccgagcggcaagagccaaatccgatgacccaccgggcaaatccttctccgcggccattataccgttatcgatacaatcctaagatattcggtgcgcatatcgttgcataaaaacgctcggacgttgtcttaactgagtttgttgacatacagccaaaattccgtgaagttcgtccacgtgatacggaggttcacttggcattccgtatccacccgcatgctccttgatatcaatcaacctttcaacgattttccggtccacatctcctgatcaacatattatacttaccaaatgcgtaaattgagttgtgttgtattcaataatatataatctcagcttcatatcttcaataaccccggggcagaaggctaatcgcctagtgcttgagagacatgccgtcttggcggatgagccgtgtcgacgtctcgggatatatggcactgcatttgttgggtgctgcttcatcctatcatatagagtaggttccaccgaatttctgtccataagcaaatccaattctagaagatgttgtggaggtcatcttggaataatggcttacctcatatctccgatcttatacgcgtcaagttttaaaacggggagtcccaattattgcaggcaagatgatatatctccagtgtctactacttcatacataatatcgaaagcatacatattgaaacctcatcttgaataaattgaaccgctctccagggtccgcgaagactaatgaacggccaagggatcgacagaagtacaattgactaaccgaggtttccgccataattccgttcggacagaaactgaacgctcaatatgtcggtatcgctgaggtcttagttgacctgcgcttgtatccatagagaagactgaacagaagtgatcagcgcggaagggagtctgattggaactagtgtcgcaaactgagtgtcaccacatggacggaggtttgatcagcggtaggttctacaggcctcgccaatcgcaggcctttgtcgagtttcgcggtcaagaacacgttcttgggctcttggcgggagcccgattcggaacagagtgtgatgagctccacagctcacctcagggataaaagcaaggctcattcgtctctggaataatgcactcagtgcgaaaacacggacgcagaaaaccgcagtactacgcaatgcctcttaccaaggggaaaacagctttcgtgacgggtgtgaacgggatcagtggccatgctatagtggagcatctgataagagaacctgaaactgagtggtgagagctgtccacatcctgcaattggtttcattccagtctgactggcctcccaaggtcccaaatcatcatttcttctcggcggccgttggcaactcactggatcgatcctcgtgtggtgtttgtggccatcgatctcctcgaccctactgagaatatcaaacaatctctgtcgacactggtggagaatgtcacgcatgccttctttacatcctatgtccacacagctaacttcgatactctgcgcgagaaaaatatccctctattcgccaatttcatcgatgctctcgatgagctgtgtccgaggcttgaacgtgtctgcctgcaaacaggtgggaaggtgagacccttcacagcactgatacagtcctgtatgacacctaactatctatatagaattatggcgttcatcttgggcctgttaaataccccctagtagaagatggccctcgttacacggacaagaacaatttctacttccaccaggaggactacatgttcgacgtgcaaaagaagagaaaatcatgggattacaacattattcgtccgaatggaatctttgggttcacacctcatggtgagtggatttaccacgtttcctgttggaccatcttgaccaaagctttgaattaggttctggcatgtccgaagtattgtcactggcgatctatttcttggtgtgccgggagctgcaagaaccggctcgtttctgtggcaatgagttcctgtggaccaacgttgacaacaaatcatctgcatggggcctggcacacatgtctgtgtgggctgtgacgcaggttcaatgcaagaatgaggcattcaactatgtcaatggggatgttttcgtttggaaaaatctgtgggctgatcttgctggctatttcgaagcagatgtgaggccctcctacggaatggatcccccaatattgatttccgagatacgctaactcatccaggcccctgaacctaaatttatgaatgctgctggagtttccgacaagttgacaaatgagttcgatatcctcgaatggtccaaggataagaggccggtctgggaaagagttgtagccaaatacggtggtaaggttgaggcatgggattggacctcttgggactctgtgatgtgggcaatgggtaggtcctggccaactatagcgtcgatgagcaaggcaaggagattcggatggactcgttacgacgattctcatgacaactattttcaaaccatcaggagcctggagaacgcagacattctgccaaaaataacgaagcggtgagcacctagttcagccagctaagatcgtcgtcccttttgttttctttctgaaaaggaccgtgtgattattgctggatttaagctgaatagaccaatgtagtgggtgcgtctcttaagtagacccggtcgcttcgtggtgggtagtcaagaaggtggtaaccggctatcttcaccgtagggctcttttcatccgactgcaggcgatttaggcagaagcggtagtgcaaaagccgcaagctctagtcaataacgagttccgtaccacatcattgctaggccggtacatagaactcagtcttaagagataccaaattgaagaatgtttccaagatggggcgaggtccacaatacccgcaggatcctcacgagctcagaagcgctcaagaatgttccgtattgtgaagatatgagatcatttctctctagcaatcaactcaatatcaaagatcccactcgggaaaacatgcgagataattgggacacgcaaaagatagtgaacagtcaggccagcactccaggtcttcctctactggtgaattgacgctaatggccaacgaggagtcaaaggtgtctttcaccggcgatcagtcagacaaaagtgacccggaatatagcaaacaggagtatgatgggctaataagcagctggaactgctcggtagccgatgactgatttgcttggccgtatcttttgcgaaggtttgttttggttcaacaagctctactactctaggcagtacggtcactgttcataagtcttgacaagcctctagctccgcctgtataccgctcatattaaacattgttcatggacttcaattataatatatatattgtattgttaagagcccggggtggggtggccccgtaatattggaaacttagtttatcacaaagccttcggatcttaagccctacctaatataatcagcagggtgtggagcctgaggggttcagacctttagagccaagtgtgagccaaaggtacagatactgttcaaaggcgggtgaggtccctccgtgaggaggttcgactattcaaacaccccccaccccaaaaccgaagccggtggtatgcctttcataaatcttaactacattcccttctgtgtgttaatcatggctccaaaaattactgttgtcttcgtatgtctgccattaacccctcgttctcgtgtttccctagattatctcctttgtagtactcgctccgcggccatatctagaagcttgctgaggctgaaaagcagggcattgagtccgccggcgggcaggctgacatctttcagatcgccgaaacactctccgaggagatactggccaagatgcatgccccgaccaagtcttcctaccctcttgctcggccgaacgatatcctgaagtacgatgctgtcctctttggtatccccactcgcttcggtaattttcctgtctagtggaagatcttctgggaccagactggctcgatctgggccaccggtggctgttggggcaagtacgctggtgtctttgtctccaccagtagtcctgggggtggtcaagaatccactgctctatcctcaatgaccaccctcgcccaccacggctttatattatgtccctctggactacaagcccgcaatttccctcctgaccaacctccagaaggtccacggtggtagcccctggggtgcaggtactttcgccggtcctggcggctttcgccaaccttctgctctcgagctatagattgccgagacccagtgcaagaatttcgacgaaaccgtcgccaaggccagttagttactgcatggcagagcccagtgggttcccacggttgaggctgtaatagttgatcattatgcgaaaaacaatccgggcagtctgtccagcaacagtatggcagctaagaaccagtgagatataagacgaacagcaaggcgccgtgcgctgttttcaagaaaggtgctgtcatgtggccgggaccacagcttacatgatttttttttgttggaacgcggtcgttacagcacggactagtacaagcagagccaattgagtacttgagagtgtgatctctacatactgtagaaagtgcagattaaatggggagttgagcttagtaaggtccttgagagccttagggtcatcaggcagatgggggcctgaatatttctcgggcgcactagttaagttacggtcctcgtttgtcgacagaaaatttcaaactattgactatattcgttactcgctattgcgtgttcgctttttgtgagtggaactgcagctctcatgtggctgatgcacttcccaaagctcagggggaactatccctggctgatcaataaagtctttctgtaagttagcaacccccacttgagagtagtcttccgcacgatccagtaaaacccagacccaacccccaccccccaaaagggctggggggcccaatgggggtnnnnnnnnnnnnnnnnnnnnnnnnnnnnnnnnnnnnnnnnnnnnnnnnnnnnnnnnnnnnnnnnnnnnnnnnnnnnnnnnnnnnnnnnnnnnnnnnnnnnnnnnnnnnnnnnnnnnnnnnnnnnnnnnnnnnnnnnnnnnnnnnnnnnnnnnnnnnnnnnnnnnnnnnnnnnnnnnnnnnnnnnnnnnnnnnnnnnnnnnnnnnnnnnnnnnnnnnnnnnnnnnnnnnnnnnnnnnnnnnnnnnnnnnnnnnnnnnnnnnnnnnnnnnnnnnnnnnnnnnnnnnnnnnnnnnnnnnnnnnnnnnnnnnnnnnnnnnnnnnnnnnnnncaacccagacccagtaatgggtctggggccccaaatggggttacaaactaaacaaacatgctcaggattccaattgtataacttacgcattttcttgtggtaattttaagtattcactttacttgattaaagcgaattttattgatgaaaagggtgaaagagaagcgttggttaagaattcctatatcaagctaatggtatccaaatatatcatcttcccggctcttacgattccgccctggtgctcgtgtctgtgtacaggttggggataatgatggtgagcaaagacggacatgttcacttgtaggcgaggaacccttctccggtgtatcttctggttcatcccccggttcatcctccggtcctctgtatcgctaattggattgacctcaatcttactaagcttctcctccctttcttcttttgccgccttaagctcacctggcgagattctcgagaagcttcacttcctgctcctctatatcaaatttcgtcgtacaaagaaacattattaacccctcaatcgtctctgttttcattctaccacgagggtagtgacagatacctcgagcagtatcaaagaggtgtttgattcccgcgccagttgccgggaatgagagtacatctcgcgcaagggcagcaatagctggaaagcgagcttcgtgctctttccagaaagtaagcggtctaatacaaatagtatctatctatgggttagtatcgttatagtatacaatctttatatttacttactgctatcaagatattaactgatttcattagtaatagctcgtggttgtatatcccttccatcaagtatctcttccagtcttgagcctggccgaactataatcggagagctttgtggatcatgaccactacttctaacttgcgcttgatatggaataagggcttgctcaaaagcaagccgataggtgtcttgctatttctgatcccaatcgctggagaggaagaatttgaatttgttcactggtgcaagcattgtactgattgcatagatattttctcgactatcatcagcttgagagtaatactcatcaaacttagtccgaccagcttcaagtgcttctaacatctgtttctcttatgggacgcgctttcggtgtagctgtgcctgtgatcgctcaagatgatcaaacagtttgttatagagcttaaaaatatagtgggcagcgacatctcgagtttttgatagctgtgttgtgtagtcaagaaaggctcagtgatatagagaagatagtcgatctgacgccactcttgctcgcttaagtagcatctcctcacaatcatactctgtacagaataaagagaaaatagcacgtagcctctttgcccggcgaagtataaagaatgtggaactccatcgtgtcttcacatcttggattggaacaatctttatatttgttgtctgaagattgtaaaatgtctctcggcgctggagacttgcattaacgtaaatcgcaagataccggactttgttcaatgtggaggagatctgacattgcttcgcattttcttgggctagccttgactgcttctccgtccactttgtctcggctgattcattcaatggaactgccttgatccgagtaagaagctgatttaggcagagctggataacatgtgcaagacatggtattcgggcaataataataatatcatctgacaaagcctgttggagagaagtagttaatgtcttgttgcttgatgcattatctgtcgttaacccgaatactctgtcttcgatgttatgctccgctagggtttctaacgtaattcacaagcgagccgccaccacctccaaaaacgcgtccatgaattagcacttagctagttcaaccacccaccatgccaccaatatgctctcaatcctctacaaattcagtagagcaagagggtaaaatcttactagctatccaggcttttcaaaatcaagaatttaccaatatttccaccactgcccgcatttttaacgtaccgcgttcaacacttcgggatcaccttagtggtacaaaacaccgcgcgacttctcgcgctaattcatctaaattgaccgcaattgaagaggaatctcttcaaaaatgaatactctctatggattctcgtagatcaaccccccgaccctctatgttacgagaaatggcagatcttctcaaacatcgccgaacgaccccggttatttcagttggtataattgggttacaaatttcgttaaacggcatcctacccttacatcccgattctcgagacgttgtaattacgagcgcgcgaaatatgaagatccaaaaatcattggagaatggtttaatcttgctcaaaaaaccattattcagtttggaattaacccggacgatatttataactttgatgagaccggatttgcaatgcgattaaccacgaccatgggctgcaccaaggtgaagtgggtgtggaaagacaggacataagataaataggtgtccagataaataatcctgtttagtttaatcaatttaatggcgttctggttgaaatatattcgttagaaaactatactcttgggtagggtggcggctcgcttacagtggcggctcgcttaccgattacgttactccggattaattgcttagataataccatagttaagccttggaagctcccgagtctggagaagtctccctaattaggcctagtcccaacttatactcgctaattctgctaattctattggcttgattcttataccgtcttttagaattctgccggtctaagtatgattacataatgcaaaatgaagccttacgtaaccaacaatgccaagacttagttacaaggcttgtagcttcttcgactgtccaattataccctggcgcttacttagcgggtacgtcggcccatacgggccagttgtgcaagtgaccctcggggtcgtaacagatagactgctcaataacagccaaattcatgaaggagtatgtctctacttgtcctttgaatacgcacctctctgattacagatcattggatcgccccaccgctggaacttgacttgtgatgcctgtcccctgagactcactagagaggattggatcctggctgggctgagctgcgacttcgcgctgaacttggtctatcaggtattgagtcgcaaaccgcaggcgctgcggaccacggggtttttgggctcgaagatatgtacatttgatacgagaattccggcaaccttggcatgggtgaccatcccggcatcggatcttcgagatttcagtataaaccgtatcctatattctaatgagagtagtgcgatcccatcacaatccttacctttcgaatcttacagccatcgcaggcggtcttagttgcgggtgatctggcagacatggtggcagagacgctatgcggggtacactatacgtcggtcttcggtgttttacaactgcagaacttcaaaagtcgcatgggattctgccggaacggaagctgttgattgctcaagtagattccattacaaagaacggtgtcatcaatcgattgcgtgactctccacggggcacgccatagggactagacccacctagtctggaccgtggcaaaatgttggcacgcgatgattcgtcgcattcttttgaactagggaaataagccaataatcgagtggataatgaatgagaagggtgtttcctgggaagactgctagaattgaattgaatcttagttgatcccgaggcacatttttatttcaactagccgacagtacgaccgttttaacactgcaaaacagccgataccgagcggttgtgaaagttgcgatgaatgcagaggtatatagattagtataatatgatttccgccccagatttcatcgaacttcggggttaatggcttccgttaccgcgagtactagaagccgctaccttcccgttgtacgtgaagaagtcgctggaataaggagcttttgaggccaacgaagcccatttaatcagaggtccaacctttttgactaacttcaaaatgccaatcgttggggtcatcgaaccaagattcaataaagactttgcctttaaaaatcatacaggaggaagcgcctaccccgaggcatttgtacactaaattgcggttacctattctcgatttcaggattataaaaatgctcgccgaggatagtattcattcctcgtaatagccttcgccgttgcggttaatcctaccgcgaaaccggtctcgtcgaagttataaacgtcgtccgggtcaattccaaattgaatgatttgtttttgaacaagattgagtcactatccttcaattcgaaatcgaccccgatgacgtttataacgtctcgagaatcgggataacagggtagagtgccattgtacaaaatgtaaccccatttattaccgaccgaaataaccggggtggttccacgttgttcgagaagaagattcgccatttcttgaacagtagaaggccgggggcagacccacgtagatccatagagagaatacatttttgaagagattcttcttaactctctgtcgatttatgcgagctggcgcgagaaatcgcgcggtttggaggccccgtagtcggttttgaagagtggaacgcggtatgttaaagcagcgcgctacctcacgaagtgaagaaaattcttgctttttcaaagcctgaatagccaacaagatcctaccctcttgctctgttacatttgcgggggattgggagcgaatcggtggcatggtaggtggttgaattgactaagtgctaattcatagacgcgcgttttgggtgggatggccggctggcctacatggccgattcgcttgccgattacgttaacgttaagagtagaggatggtcagccgataaatgatgtctattaaagatgcccattagatatgtctgcaaacatgcgtcacacttaaaattaccataaataacaagtaactccagattagacagcaagcaacaattgtttgttggggacctatttcaagagcacagacggatattggtagtccaaagatgctacatatgagctcaagctttggacttgaaacaccttatctcaaacattttcaatggcgcattgtgcaacttgagctatttcttgcaaaaactggtccaagggctgaacgtcaagaaggttatccggagttgaacgagggactgacaactctgcgaggagccgcgaaacagcgtgaaggaggttactgtcgtattgcgccaacggatgcttgggatgctcgagaatattgcaaaaaagtgtaattgaggcagtgaccggataaaacaaaacaagcctgcatgatgtagtcagcttttggtacaaatcacgttattacaaagatcaagttctccacgaaaaggaacggaagccagaccagagacagcttgggaactgaatcacatgacgcgcaatttgcaggtatcgcaaagaagatcggctagcctcggtggcaaggaatgtactggaactgataccgggactagtcgcattgagtgccttctcctttcccatgcaacggcttgtcgcctggtggataacagtcacacagtggtgatattccagccgtatgatcaggctgcgtagatccaattgatcttgatcccagtgtgaaacttcagaaaaggacagactcggtcggtatcgttccggaaccgtcatccgccaggcttccaaatccatatctaactgccggacagctgtcaagagctccgcatcaggcttgagtaatgctgaagccgaatacagcgacttgaatacccgagacttgacctggctcaatttaatgtcactaggaaatatcctgcagggatgaagtctctccactgtttctagatctgcgcacagatgctccacttcgtatgcaaaggttctcaagtcacagaattcgtcaataagcataggaggttgccgcgttcgaaatgacatctccttatcgatagtataacaaatccagaacaaacaccgtaattgtcttctggtgcgaagcaaaccttcagctgaatcagtcttcgaggaaggaacaaagatttgattatgcgcccgagcgtgtaaatgaaatgggtcgttagagaattggtcgtagccgcagatttcagatttcccgagtagaattgatatgccaacttaggtatagttagttttaattgcaggccataagaatatggagaaagggcttaccagcatgacgcatgtttggaaggcctcaagcgtcatttcctcaagaaacacagggatactttggttaatcttggcaatgtagccacctatcttgtccgtcggggtcaaaggaacgccgatgtcaaagaaatgagctagtatcaaaaaagcgaagatacatgtcctcgcgccggtgattttggggctatcatttgaagacatgtaagcccaacggattgtctccttgaataaaatagagtccaaaaccggtaaaacccctcgaaacacggatttctggtaggactcggcgcattgctccacaatggattggtcagggagagtcaatctgttgaaagaccccatttccgacggttctgaacttgaaacagccgaagatcggtcgttccgctcgaccgtgtctagagcaaatttgcttttcgacaaaagtcggccagatctagcttgaatccatttttgcccttcagccgagaaaagaggaagtcctgtggcaagattgatcatgccaatctcacgcccagcagaatgaatcactccactaggttgagtcgatgacagcgagagtgttgggcccttaccaacgctggcctgtgactcgcttttcaggctattacctgatgacatcaatttagtgacatggtcgcactagctgcggggtcaggataatttcttctttcctccccattcctctctaaaaatagaggaaaagaaaggaacaagacaaacaaggaaagataacattattgcaaagaggttgaagaatgactcactatggctgcttgacaacggtgccttaacggtcttacgatgtaaagtagatgattctctgctatgtggtattagtacatgtgcaagtgtttttgcataggattgtctgttcctcgataaagagtgccttttctggcatctgttgtacgtgcaatggacctggtagtggcggcaccaaaagcagatcggcaatacagcattacatctcaccttaagataaacgattcgacattagtgaattaattttatcgggcatggtgatgcagtgtattgtattaccttgcgtttccaacaggaatcacaagccgagattttctgtcctcgatcgcctcgacgttccatggccacaaactcagcagggtccgttagttcagaggtcaatgcgacaataacgaagctgcatttatgtttgtttgcttatttaccggaggaaattagcttgaatgggtaccgggaggttgcgaaggaacacgtggataaatagaagagcatggaggagagctgggctggataccgcctaccagatccgatactcttacgtgtcattggcagattgttattatcctgcacaggatctccgggagagtagcttactaagcagcaagcgtcttgagtttgtggtcggttgcgaggaacatagggcgcactagcacgtcattgccaatggtcagatcggacagttcttgaggtatggtttagtttagatatgagagaacaaaaaaagggggttttgtgcttcaatagttgatgccttcggaactacccgcgacgtcttgcccaacaaccatgagttgttcatatgattatgacttccgctagtggtcgtcgttaggactgctcttggaatattgcggcaagattagtggtatttttcttgaagaaacgtttaatacaccgaattctaacgccgatctatctgattttgcgaacacaactcagatctctgccgccttgatcgcacatacaccaatgagcggccctataattgcaatgctaaggattgcggcgaaagcctcgcgcaacgcaacaccttgacagcatgctcgcagactcattgcgtcgaaaagcctaatatttgtgatcaccagggctgcgatagagttgtttcagatatgacgcaccctagcccatggtcataacccatacattaactatcgctgacgcttggtctgtcatcgcctaagcgacatgggaaagcggcattacatctgccacgagacgaattgcgaatggaggtaagcaaaatgtaaaccattgttcaaagaaccccaccgatttccatttatcgcggtctttgagtacccccaaatcccagatgggcgcaaccgcctctaatcgtgcaagttgtcagccttcaagtggacgggtccaaatcctctgtccatgtctactcagtctagcgacattttcctacacatgtaagtgttcgctgcccctaaagaagtgcaccggatagggtttcggacagcacggttagattggacatctggcgagagtacaggagagcatctgttcttcctgccccgagttgagacggccacgtagaatctccatcgggtacacgaacagttgctagacactatctcccggcatgttctttggtgcaataggcactagcttttgactgtccctgtggcctcgtatggcatctctaccacaacccagtcacttgacactttcttcgctagctgcgctaccacgacggtatcccttgatccgaagttttcaagtgatactggcccataacatgtgggtttgttcagagtccagacacaaggaatataagctgcttttcatgctgtagttctccttcaattacaacgtcattgaagtatttttgcttctaaacaataggaaggacaactccgaatagccgatccctcactcttctcttgcgttatccatgaagcttccaaattgcgtctggaagggggatttcagttctcaagtacgcgtatcacccgatcccggaatagttccaacgcctgttcgagaaagcgcagccggaatagctgcttgtcgtggcgaagctgaagaccgtccccctctttgctcagatgtgtgccagcctctttcactatctgaattctctgctctagcttctggccatggatttgcttggacacacatggctccaataggcatctatagagtccaagaagtccagctgctggaaaggtgaacttgggatcgtggcgttcgaggtctgctagcactttcaagatgggttgaaagggctcgttcgccagggtatgtcttgattctgcttcctgttacgaggaagtgggctgcaatggtcagccagaatatttgaagttcctgtggtttgtctttttcgctaagggtgggcaattcactgggctgctgatctccttcaatttcctggtctgtcgagctgtttcgtgcgtccattttgtccgcaggagaaggtcaagatcttggcaggaccgtttccatcggggctttatgtcccttatggacaagtcatgcacacgcaggtggctatggacttggttttacaatcaccactataaacagtcaagttctgactggagtttttttgcattttagtgggctgttgacaatgtattcactaataaggatcgtcggttggggaaactgatcgagcctcacgatcttgagggtcaaagtacgaacgcttggtgaagatatgtatgtcaattcgacacctcttccaaattcgttgaaagcctcatgaatccgacaaataaaacgttgtagaacttgcagtgatcaaacaagaacttcaatgtatcttcgaaatttgagtgttggcaactatggctaagcttcaacgggttgataggtcgaacagcttacatttgaccgtaaccacgctttttgcagtctagacagacagatccgcacaggtcaacacaataaatgcaacactaaagcgaaaaaaaaaaatccaaaaatccaaaaattcatgatttctcgggatgaaactgtgggcggtttccgatgattcatcgttagatcgctcacagatgaggtgatcagaacgcgaaatataagcctgccattgcggatggaatatcccccacaaagccagttagccaacgtttcttgacagactcagcatcctttttcttgataccactccaaattgtctctctcgctgaggatctaaaggcatcaagaatgtcgttgcaaatagttgcggtaaaaagaagacatgggcttcaacaggcctcaattacgagaggcgcccccaaacccttctaccaagcagcgcacttgcgcaaaaagactagccgacaagcctataaatacgtcgtctgcctccggcaattcactttacaatttattcacctgactctgtaaagccgagcaagtctgtgtctatgaaggggaggtatcgactttcaatactcgacggccatggaagccatttaacccctaaattcgatcaaatttgcgaggataacgatatcataccaatttgtatgccaccgcattcttctcaccttttacaaccactcgatatcggctgttttgcggtcctaaaacgatcgtacggtcggttggttgaaacgataatacggcataggatcaaccatattgataaacttgattttctcgaagcatacccttctgcacgaattgaggcttttaaaccagagacaattaaaaatagcttctcggcagccggtttattaccttttctacccgatcaggtactttcgaagctaaatatttgtcttcgtacacccccacccccaagccgggatagcgattgggacccaaaaacgccttcaaactatattcaactacaaaagcaagcttcgtcaatcaaagcattacttcgtataagatccagaagccctccgagtccgctaaattcagcgatcaaccaggttttaaaggcatgccagatcactatgcaatccgccgcatttctcgagaaagaagtaggcgatttacgcgccgccaacgagaagcagaagcaaaagcgtactagatctcggaggcatatacccgccgaagaaggcctttcagttcaagaaacaattgaagcacctccccccggccccggcatgcctggagaatctactattcagccacgtacgcgggccccccccccgggggtgtggaatatgcagaatgccagggcatagaagagaaacatgtctagatagacgagttagttagttgatttaatttaatggcgttatggttgagataacgtaatccactaccgagtgacgcacccccacccaacttcctgaattcaaatgcatttatctcaaccaaaacgccattaaattaaataaactaaaatcatcatctatctggacatgtctctctcctatgtcctggcttcctacatattccacatgctcgtctagcctgggggggcggccttaaaccttccgaaacctgctcacgatagttgttgatacgcgctacttgggcctcaaatgactctgaacgtagctcacgaacatcctgaactgagagatccccttcgtggactatcgtccttatagatcgagttcgcttttactttttcttctcgttttcagcgcgtaaatcgctcacttctttctctagtagtgcggcagaatgcatcgtgatctggcaggcttttaaaacctggttgatagcggaattgagtgggctaggagggctccttgatctcgtacgaagtagtgcttttattgaggaggcttgcttttgcaattgcacatagttcgaaggtgtttttgcatcccaatcactaccccggctagaagggggggtaggggttcgaagacgaatatcaagcttcgaaatcactctctccggtataaaagggactaaaccagctgctccgaagctgtttttaatagtctgatttaaaggcttcaattcgtgcgagagggtatgcttcgaggaaatcaagtttatcaatatgatttatcccaacccgcatttttgcttcaaccagccggccgtacgagcgttttaacaccgcaaaacagcctatatccaaaggctgtaaaaggtgagaggaatacagaggtatacagatcggtataattttgttttcttcacagattttatcgaacttcggggttaaatgacttccgtggccgtcaagtatcaaaagccgatatacccccttcatacgtatagaagtggtaggaataaagagctttttcaaccagcgaagtccaatttcatcagaggtccatccattaggactaacctcaaatcgccaatcgtccgggaggccgtcaaaccaggattcaataaagactttgcctttaaaaatcacacacagtggaagggcccaatcagcagcatttatacacttaatagccgtcacccattcacgatttccaggttgtaaaagtgctcgccgactgtagtattcgcttcttataataaccttcgcagtcgccgttaatcccatcgcaaaacccgtctcattaaagttataaacgtcatccggatcgatcctaaattgtaggatagttttttgaataagatcaaaccactcctttataatttttggatcctcacatttcgcacgctcgtagttataacgtttcgagaaacgagaggagagaagaggacgtcgtttaacaaattttgtaacccaattttcgccaaccgaaagaaccgggctagatccgcgcttttcaagaagaagattcgccatttctcgtacagtagcaggccggggggctgctccacgtagatccatagagacgatccatttttcaagagattgctcttcaagctcagtcagtttatatgagttagcgcgtaaaatcgcgcggttttgaacaccccggaggcggcggcggagggtagcctcaggcactttaaaacagcgcgcagcttcacgaattgaagagattttttcattcttaaaatcttggatagctaataagatcctaccctcttgctcggttgaatttttagacgatcgagaacgaattggtggcatagtgggtggttgaagagagagggttatattaattgacgcgttttgggtgggggtgcgtcactcggtagtatgcgtcactcggtagttaaatgcatttaaatttaataggttgggtggggtggaccactcgtttgtgtggaccactcgtatgtgaaatacgttatcgtaatgtaatctagttgtccccgctacccagtagtaccttgccggaaagttgggcttcaccgtctgatagattcacgaatgaaaattttagctatattaggcctagtgtcgctataagtacaatttgagagaaaaaaaaatgaacaaggaaaaaagagttaaggttccaaaattattcttaagtgaaagtaaggatgtctttctctgaaccaatcaggaaataggtttagaaacggccattgaagacctcgtagttaacagagcactgattagtaaatcaggatgaaacgccgaaaattgaacggatctaaatagtaaaccgaaaccttaactcttgttctaggctgtttccctttagacatacaaccttatcgcattatgtccgattatttaacattcatctttgcccttctgggtgcaaatactcttgggtaaaatcactgcaaccctgctaagatgttaattaaattacctacttacatagacttcgcggaataccagctatactagtcagttttgtctttcactaacttaccacgcttcatctgatatgtatacaacgataaaccgttagggcttttataaccctgaccatggtagccttagggtctaattctagataccaattcattttttcataaattggtttatctgcgtatttacctcctaattatattaataaattacatagttaattacattatgtaatttattaatatgttacttgcatctaaaattgacttgctgacctatcatgcaaaaggtacgctcttattatttatttatttaagttttcacaaaaggtgaaggctcggggagagtcgcaccaaacctaccgttgtgtgggggtagacccacctagggtgcctacccattccgcgctgcctttcttcctgctgcctttcttcctgctgcctttcttcctgctgcctttcaagctgcagccacagattttatctctgcgtctccctaacatttgagcgagacaccggttcctgtcttgatcattttcaatcgtagaccaacaagtcgtcatcctcaacagttgccaacggaatgaacaagacatctcacacggacgagcccctcgagggtgacggctacaaccagaaccccaatccaaactctaaggacctgaccacgaatgaggactttaacggtcttgtcaacagtcgggccgtgcgggaaagcgactcccaagcactgtcaaacgcggcctcgaacgcctcaggggaaatagccagccatgctcctatccaaaaggacgggcacggcaaggccacctatcggctggctcagcggtcaattgatcgtggccagccccctgagggtggtatgcaggtacctgtaaccgcccaccccccggggtttccgccagcttcggctggtggtgacgccgaccctggcacgctgattcagcgcgcccggaagatgcttgctacctttggctccttcatcggaccgggctttatgatttcggttgcgtacagtatgtccagggcgctgtcgtcctgcagtctttcccttcacctcacttacatatgtgcacctagttgatccgggaaattactcgaccgacatcgctgcaggagcctcgtaccgcttccgcctattgttcgtcgtactcctctccaatatatttgccattttcctccagagtctggcaatcaagctcggtaccgttagtggtttgaacctcgccgaggcatgtcgtgcatttctcccgcgctggctcaactatatcctgtacgcctttgccgaagctgccatcattgccacggatatagcagaggtagacccctagtttgctccacgtttcgtatgttgtgcgtcgacaaatgctaactggccaggtcattggatttgctattgcattgaaccttctgattcctaaggtaccgctggtcgcgggatgcgctatttccatcctcgatgtcatggtaactctgttcttctaccacccagaagggtctatgaagggcctaaggtactttgaaatttttatcatttgcttggtactcgctgtggtcgtgtgcttctgcattcaattgtctctaatccgtggtaccatgcccggggaagtcttcaagggttatgttccgtcaaaatatctcatcgagtcggaagcgtgagttcaaaattttcctccacccccttcatctttatcctaatgtttttccagtatctaccaggcctgtggaattctcggcgcaacagtgatgcctcacagtttgtacctcgggtcgggcattgttcaaccccgcctacgcgaatacgatgagcggagtagactcttacctcgtcagcttgcatcaggatattcggttctagatgatggtatcgacaaaggttactacgtcccgtccttcagcgcaattaagcactcgctcacggtatcgattctcgagctggccatttcgctcttcacatttgccctctttgtcaactccgccattcttatcgttgccggtgccgcgctatacaacaacccagatgccctcgatgccgatatatttggtattcacgatctgctttcaaagtccatttcgcccgcggcaggtatcatattcgctctggcgttgctcttgtcgggagtctcagcggggattgtctgcaccatcgccggccagatggtcagcgagggcgcgctgaactggaatatcaggccatggctacgccgcctcgtgacccggactattagtatcacaccgagcatcatcatcgcgggagctgtgggtcgtgaggggcttaatgcagcactcaatgggtcgcaggtagcgctgagtattatacttccgtttattaccgcgccgctgatctactttacctgccgcgataagtatatgacagcctatcccggcaaagcgcgttggcgcatggctggtagggatgacgagagcgacgtggaccaagtaattggggagggagccgagctcgaacccgaaggtgtcaagatgaccaactcgtggtacacaatgatcctcgccgtcttgatttggctcttcatgtcaataatgaacgtggctaatctggtgttcctgggcaagtaagtgccacagtaccgcaatggcttggtggggagcagttgcaggagggtcactgacccgaggagagggatatccacatgacaattcagtttattgctcccaatcggaatcagaccgtgcgcacttgtttcgttggtacggagcgcaagtatgcgttgcatgggcggagtaatggaggattgatttcagggatgacgaaattcggaaaggagaaggcgagggaggatagaagggctcatcataagaaatagcactctcttcgtcctgagacatcaatatctagcaccttcatgtatccaatccgcatagtaggatgctgataatgaaaagggcctaagggaggggagtgaatgagcgatgagaggcactggcatgtgggatccaacacatgaatattcaatattctactcaatcagatatcaagctatgtttcgaaactagccaaatcaaaaatagaacagtatctatggaaacgaaataaaccgataatttatgtaatgatgattatacgtttttaattggagaatcttcgagttcgtgttccgctgcttcgtcatttgcctccaaaactgtactaactaggcaaccaatgttttcacgaaccttctcatctttgatagcgtatatcagcgcgtcattgacgaactgagccacgatcttcgagatcacaacgatatgttctcgagcagtttcagcccattacaatgattacacatagaacagctccgcaaggagagcttggttgtagttacccggtgactcttggcccctcgtttgatcatatacctatattaagtatcacgaaaagttttcctgcgagcaaaaagtcatacctatcgaattcagtcaaacatcccctcttttgtcacaaaatgttgtccacctttgtctttccggcatctgggtggtccgtacatcaacccaaattaacgtaattcacatacgagccgccaccacatacgacccgccaccccatccaaaaacgcgtccatgaattagcacctagttaattcaaccacccaccatgccaccaaaacgctctcaatcctctaaagattcaatagagaaagagggtaggatcttattagctatccaggcttttaagaatcaagaattttccaatatttctactaccgcccgcacttttaacgtaccgcgttcaacccttcgggaccgcctcagtggtatacaacaccgcgcgacttctcgcgccaacttgactaaattgaccgcaattgaagaggaatctcttcgaaaatggataatctctatggattctcgtggatcggccccccggccctctatggtacgagaaatggcggatcttcttcttaaacaacgcggaaccaccccggttatttcagttggccaaaattgggttacacattttgttaaacggcaccctacccttgcatcccgattctcaagacgttataattacgagcgcgcgaaatgtgaagacccaaggattattggagagtggtttgatttagttgtttgatctagttcaaaaaaccattcttcagtatggaatcgatccggacgatgtttataacttcgacgagacgggttttgctataggattgaccgcaacagcaaaggttataactagaagtgaatactacggtcggagatcacttttacaacctggaaatcgcgagtgggtgactgcaattgaattccagatgattggcgttttgaaattagtccaaacggttggacttctgatgaaattggacttcgctggcttcagaaactgtttataccatcgactttatcgcgtatggtaggaaggtatcgacttttggtactcgatggtcacggaagccaattaacccctcaattcgaccaaatttgcgaggaaaacaatattataccaatttgtatgccaccgcattcctctcaccttttacaaccacttgatatcggctgttttgcagtctcaaaacggacatacggtcggttggttgaaacgaaaatgcggaatgggatcaaccatattaataaactcgactttctcgaagcataccccactgtacgaattgaagcttttaaatcagagacaattaaaaacagcttctcagcagctggtttagtacccttttcacctgatcgggtccttttaaaactggatgtttatcttcgaacaccaaccaccccccctagcaggggtagcaattcaagccagaattttacaccaaaaacccctgctactgggaaagatctacgtcgataggcttcgtcaatcaatgctttacttcgtacacaatctcgaagcctaataagtccttccaaacgtgcattaaaccaacttatcaaaggctgccagcttgcgatgtatagcgctattttactagcgaaagaaaacaaggagttacgggatgaaaatgagaagaagaagcaaaaacggacccgatctagaaggcagatacccgctgaagaaggcctctcagttcaagaagcttctcaattgattactgaggtggtggaagcatcagaagcacctctatacctcccgcgcggaagccctcaattagggttagaaccacgtccacgggctgcagcaaggtgtagtgggtgtggaagaaccgggcataaaattaacaggtgtccagaaagatagttgaatttagtttaattaatttaatggcgttatggttgagataaatgtatttaaaataggtagaagaagattatgagagagatgactaagtagaaaaatccaacctccatcattgtcgtcaatcaacacttttccagaaattgaagtctaaaactttgtgcctactcctacatcttataattctcgagaatatatatttgaaaactactctctatattaattgtatatcgagggcagagtacaatattatttcaacggtcgacgactaccacttctttaatatcagtctgtagtccaggtctctcgatttggcccttagccttgcagtaagatcttggagatgacagaccagccacatctggcatagcttaggcccaggcaccgacaatagacatgcagaaagctcctaagcagaccaaaagaaatgcataaactcgtcttctcccacgaaggatgcgccagctctcgtcactaagaaagtcttccgacatcagctctacgagagaggcgaagatcaaaagtccagcggaaatggcattcataatgccaacaacgagcaagccgacttccgagtccgggctatagagtgtgtgggttgcaagcccgatcgcttgtccaataggcgttctatatatccgtcagttcttcaatttttgaatgaccatatgtgaattaaagaaacatacgtgcagccataggcaagtgacataaaccagggctgtaattgcttttcagaccaggaaagcgaagcaattcgggatcccaatgcgagaccttcgaaggtttctattgactattacttatttcattcacaaagaggtagaaagatcaaataactcacgatggaatacaattgcgatcaatagaatcacaaattcactcccaattgacacactgagcgacatgccaataaagatactatgaaagagaatacccatttcaagaaggtaaacctgcatggtctctttcctttggttctgctccggtgtaagaatatgatgatcattatctcgctctatatccgaccggaatactccattttctttctcgtgatgagtttgagtctcaggagtagataagactctaacaactgtttcactttcatcgctcatgtggtgaataactcggcttatacttgaggatcttccgaccagaggacccatatcacgtacatggggttgataatctagtgtaacggaatgtgagctttgcgctcgaggttcagccgaggtataatcatcaagttgtgctagcgtatctctctcgggaccggaagaggatcgcttctgtgataagtcataatttcctccacggcaaatactctgagctggactaaataccatctcaatgaccgtgataaagaaaacacctgctagtgcaatagcacctggcatggctgggtagtcatttgtccagaagctggaaagacatgggtcacctaacgattgaaacgcagttggaagcagatgtacgaatgcagtggcgatcaaaacgccagttccaaaatgactgacgaaaaatagaaatgaaggcggaatgtgcagtcgagggaaccgagttgcgagaattgggaatgcacatgcaatagtcgatgttccgaggataatgaacagcgctgcgacatgtagtggaagatcgtatgcagcttcgcggacaccacctacggcacaacttgatcgtttggctggctgtgagtcttgctgttcaacaaggaaagttgtttcgagagctagaggtgcctttgggataaaacaattgcctaagctgttgtgggaaatcaaggcagaaataaaaaggaccgagagcagccaaagcgcccagtctttgactttttgatacgacaagggggtcttgttgagatctagttctccgtgacgaatgctaagatttttttggggagcgaggggtcctatttatttgatcagcgatacaagcatcaggggctgagtatgacatccataccaatggacgcctcgcctaccccatggagacgtttccccagatctgatattctgggccagtgagcatgagcccagtttgaatggttctgcagtaacgctagtccatttttatcgcccttgttctcacgggtgttggaaatgccaagaagatcttgacgggtcgtcaaatcaggagcgaaacgcggcgggttctgattccactcatcatggaggagagtatcatcggtccgggaggggcaattcatgatgcaaaggtgctcagtgtatcagcttatctagaggttcagagaaaaggaacaggggagcatctatgcgcttaaataagaaaataatccattaggcaccatcgattcgaatgcttggcattcggtggactccggcccgatttcttggcagcgaggaccttttcgccgagaaactgcgcgatcatgaacaccgcttaggcggcgagagttgaacacggcacatcaaaagtgcgagtagcaagagcagtagggctctttgttgtctcttaaaagcctagcttgctaataattcataccctgttgctctgctgaatctagaggatcgggggcgaattagtgattagtgacataactagtgttgttaaattaattaagtgctaatttatggacggatggggtcacttcaacataagtgacttttgccaagccactccatttattaactcatttactaattccagcccagcagaatccgcttagaagttgacttcctttttttcaacctaacccgtaaatgctgtttcccgctcatcccaactaataatttgagtgtatcatcgttttagatgaggttcaaaagcagactttgctaattagttacaagttgtatcagctatgtattagctatgcctaattggggttaatacagaagggcttacaatcataagataataccagttagtaagtggccagtaccttgctccaaatagtggagccctggaatgttcccgcctgcctaaatcggcggttaatatatgcgttaaataaattgacgcaagatgctagatcaaccctattataccctaatacctccgtaactactccgtagacctcggcatttccctatggattctcaaaattatcctcccagttccgatagagcaatttccataggagtaggcggtttctcctagctcgtccgtatgttgtgggattcccatagaatctcataggaatgccacccactttctacctaaatctacataattctgatttcggatgcataggtagaatggtttgatatttaagccacgggcttaatgatatttgcattatttacagtccttttggacttccatgggaatttggtgtgtgccgtccacctacagctatgggaatattccatggatggataccatggaaaatgccgtctatccacaatcgaaggaggccctgcagatcaagttcgctaattccgatcaccgggtgtttcacacgcattccatattccggaaaagtcttgacagtcctgatatgtcggtatttgagtataatctctgcctcatttcagtcttgaacgattttcctaggaagatccgtctcgccttgtattttctgaagtccattcaatactgaatatcctcgacacatatttggtttcactcacgcctccttctttacacgagagctcgtcacccagcaggccaacgacgttcgacctcgtgggatccttatggaacatcggttcaccgcgacgggctcaagtcattggagttccgtgggaaacacagatcggatcattccccacagttcatttcgtcggccaggaaaccgagtgcaacacagatcttgtccactgataattgccctgatacttacattaatcgcaaccgcatttttcctgcccagacttttctggaatggcttgccttcgaatctgtttcttccagcggacactccgcccactataaagtaaggtcaacgttcaaagtcatgcgcagccaattaacccaaataacttcaatatagaattatcagtgataagcacgacaaggtgttcgctacgggctgcctatccgttacttatgagattcagagatctgctcgtatgaacgctgctttcgttgtcctcgtgagaaaccaggaattagatggaatattacaatctatcaggtctattgagagacatttcaaccagtggtttcactacccatatgtctttctgaacgacgccgacttcgacgaggaattcaaagcaaagatcaagagacatgtcagcgctcctgtggagtttggtaaagtcgaaagcactctctgggactttccagattgggtcgatcccgagattgccagggagggcattcaaaaacaaggtgatgctgacataatgtatggtggaatggaaagctaccatcatatgtgtagattttactccgggtttgtcttctcgaagtgcacattaataaaatgctgaactttcaacaggcaattttacaaacatccgctgctgttgaaatatgaatggtactggcgcttggagcccgagattaagtacttttgtgacatcacatagtgcggtttgatcttccttttctttttctgaatttaattaacaagcgcaaatagtgacccctttgtcaaaatggccgaggcaaataagacctacgggttcactatcgccatcaaagagctccaagagacagttccgaacctcttccgatatgcatcggcatacaaacgcacgaaaggtatcaagtccaagggtctctgggagatgtttttaaatcgaccgtcaggagtaaaattgccttcctcggaggacgagaaatggaataatcttcctgaggatatcactatgttggattccgatcatgttcattcggatgaaatctgcccggatgccatggagggagagtcctacaacttgtgtcacttttggagcaactttgaaatcgcacgcctggattggtatcagagcaaggaatatcaagaatttttcgaaatgatggagagaagcggtggattttggatggagcgagtcagtaaaacatccccccttccaaatggacgcatgcttatcattaaccgagtttgtagtggggtgacgcgcccattcactcactcgccgccggtattcttctttcacccgatgatgttcactacttccgtgatattgggtaccgtcacaccactattcaacactgccctgctaatgcgccagctcgacaattgcctcgcgctccttttcttgaccaaaccatagaagatgaaaaggagcgtttggaggaagacgaatactgggctaattttgactcggtccgggagaacggcgttggctgtcgctgcaggtgtgacactgatgtcgtcgatgccgaagataaagagggttcctgttttgccgaatgggtggatgttgcggggggatggacctctccatgaaacatgaaatacatagttattcacatgcatgctctcgcatacgatcttgacccttgcgtgtgcctaggaatagaatcaatcacagcaaattcaattagtcttcgaggtttcgatatcgaagacgtgctactccactacataagaatttggtttacgagtttcttcgacaacttccaagggatctattggttcgaccttctcgagtcaatcattcaagacgtccccgtccatatctacaacttccatgaaactggtctataaatcgaccaaggaaaacctccgaaaggtgttagtgacggccatagccgctcagcatatcttccatgcgagggtacacgcgaattaatcaccaaaatcgagcgtatcaccgcggacgggttcgttcttccgaaggacaaatctctctatcgcgacagtttcgagccttcggccacatcttcgggatccaaattcgaaaacaagctttcaaaccctcttttcgaggcgatggtatttatcctttcaattcttcaattgttcaaagaacaagctagaaaacccagagttacgagttttcggaaacgatacttcatacttctcggatgctacacatccacaactccaccaaacgggtcgtattcaaataaaatcgagaattcgatagagctatggggcggcggaaatgtatcccattggttccctacggtaatagtatggacgcgacacatgctgacgcggcctcgtatgccacgcattacgaagacccatagcgcgcagggtccaaaaaccccctttagggcctgactgcctgaattagcaccgcgctatacaatgtattgtaaattttaattacaagtccaaaaagataaagcctttgggcccgcacaaatgtcggcatcttcatatttctggagggtttacaagttcaaaatatgaagcttttcatcccagaaggcttcaatgctgagaaataagggaatcctaggatttgtgtcacatttcatgcccattttctaaggcattcctgttgtcgacctcgaagagctctgttatggtaattcaggttttcaatgtttctgccgttctaaaataaggcattcaaacatcaaaaccccttttagggattttgaaccctgagtgctatgggtcttcgcatgctatttccgaaatccggagcaatcaagggcgaaacgatcagtttctcgttcgtcttcggtcaaacccggcactaaatttgctggtacaacaacaagctagtttttctggtgatacttccctgtttgctataatctgtgacattacaaaggaaaccaagcatttctctcctctagcaattgattatcatggcatactttccagcaatcttcttgctgactctcttatctgccattatgcctgttttatgcagcgcgacatcgaatgtacccagagactgtcacccattgccaaaacatttcggctttcttccccatccggtcaggttcgaagtcttgcgcaaagaaaaacatgacgaaaaaatatgcttccagggatcgatcgaaaccaggaaaagccaatccatggagatgaatcaacctagcaggcctcaggagccgttttcatcaacgcgagccgaaaatgacgatacagagacagctgttactacttcacaggtaggagaacctctgtgggttctgaaagtggctgcaggagaccttgctaatcaatcggtagggttctaatggcaaactggcggagggtacggaactcaaattcccaacattcgcgaagaagagccttcccgctactgagcatggactcaatgatatgagctcgccatttccctctaaagaagatacatccgttccttccgttgacagttcactccactcaatcatttattcattcgccatgatcattgtctctgagattggtgacaagactttcattattgctgcactaatggcgatgagatgctcacctttgtttgtatacagtgctgctctctctgccttggttgcaatgactctgctttcggcccttctcggccgcagtgttccgacattgcttcccgatacatacacaaaaatgttggcggccgtactattcttcgctttcggcttgaagatgcttaaagagggctatgaaatggctccaaatgaaggcctcagcagtgagatttcggaagttgaaacggaattgaaggaaaaggaccatgagcgagtacgtgacggcgaccaagatacatatggtgaaattttcgatgtggaagctggtcatgatagacaagattgcccagcggatcagtcacctgcttcgctaggtagaaatttgtctgcaagccaccagtttcctggttctgttcggtgccattggcaatctctcatggcaggaatgagcaacctattctccctttttctcagccctctatttgtgcaaatattcgctatgacctttttcgcggagtggggtgaccgcagtcaactttccaccgtggtaatggcaactggtccagattattggctagtgattcttggagctgtttctgggcatgcgctctgtaccgggatcgctgtaattggtggtcgagccattgctggtcgagttagcatgcgagttggtaagtggctgccatgttgcgaaatcctggatcgaaactaacgtttacagtgacgttgggcggcgcggccctttttctgctatttggactcatatacctgtttgatatcatccgataaagcaaaatgctccacctggttgagcgtatatatgtccgtgtcgaccactgtttgaatatgtttcggacaagttacaagcatatggttgatgtaaacaggcttatcaagacctgaaagaggtgtgcttcctattgtaagattaggtcatgtggcctcctttttgctcctagctttacggagtagtcctagaacaactcagatcgagtattccgagatttacatatccctctattacttatttccatatacctacagttccaccgtaaagtttttcatactacccccatcaaacatatatctcatacttgcaatttcgaggcccaatatacactatagcggggcatggtggttccaaagcagtggtgggttttgtgggagctgagaaaaacaagctatggtaatatcaaatggtaaagtcaaatcagaatcgaatgatatcgccccgtctaccccataggtttcagctccatcttgcacggttagtttgaccaaattcatcagcatcgccaataaatccgcaaccaaaaaagaccctagaagtttattattagagttatttttcacgccatacttattatgttgtgattctctctccaacaaaacattgctttgcagagcctgagcgcatcgcagatcttcggacccatttagctgctgttactgccccaatcgcagtgtgtagtcgatgagacgatttttcgattttcaccatcttgtcgaatatcgtcggagaacctttcattctcgatatggataatagcacatagtcaagccgagagccgctcatatctgatttcaaagaagcttgcatcacggctgctgtatgatgcatcaatgccagcttgaaacacattgtagtaatttgtggcgatctttatcaggtacatacgtatctggtttggagaattccgttccgctctaagtctaccgagctcttcgtttttctctcagaaaagacgccggatatcatcacgaactttgggtagctcgcgctggatatgagtgtctaggatttcttccagaaaacatcgcagcttgtcgaccccaacgcgtgaaggatccagccctgcttcttccaaacctcggttgaaaaatacgctagtcatatcttgcgtcgctgttctgtggttattcctgtcttcagcttcgtcgggctggtttttttcaggatgaaaaatccaaaggtgagtttgatgaggtcacagttctaggcaaggcgagcgatacgtgcctccgtaccggcattgatgagatatgacttgggaataataccgaaagtgcagagaacatcctaaacgaaccgtctcgcacgctagatgatgccctgggtgtcaacatcattggtggccggtggctttagacatcatcctacgaactatgcaaatcccaatgcgctcgcttagctctttcacataacaagaaggaatattttctcctcggccaggaaggaaccaatgatccttcagatcgtaacactcgtggtccattccccggcatcttgctttaacctcctgacacatcgagtattcaatccattacctcgattaggccgtttcacacatccggccttagctgctgtattatacttatcatggtacttatcatggtaacttccaattgcgtccgtatcggtgaactcatctgcccagtaacacaaaagaactgctccaactctgcggacatagacagcaccgacagcagagaagagcctcaaggcagacgagcgtagtctttccatctctccgataaacattggatgggaacaagatggccgttcctaacatcagctcttcacagtaaatggccatattcgtcatagttcgcatgcaccgaactttacagggaaagaactacgtcgtcagacttcatcaatcaaagctttacttcgtacaagatctcgaagcccgcctagcccatcagatcgtgcattaaaccagcttgtaaaaggcttccgtcttacaatgcaaggtgctatcttactcgctaaagaaaataaggatttacgcgccgccaacgagaagtagaagcaaaagcgcactagatcccggaggcagatacctgccgaagaaggcctctcggttcaagaagcatctgcattaattactgagacggtggaagcaattgaagcacctatccccccccccccccgccaccggacagccccgcccannnnnnnnnnnnnnnnnnnnnnnnnnnnnnnnnnnnnnnnnnnnnnnnnnnnnnnnnnnnnnnnnnnnnnnnnnnnnnnnnnnnnnnnnnnnnnnnnnggaacaattggaaccccctcccccccccccccccggcgaagaaggccttcaccacctttacagccccgaacgagagcattaccaacatgcgggttatgcaaaaaccaagggtcataaaaaaattgcatgtccagagaatagatcattttagtatatttaatttaatggagttttggttgatttgtatgcatttgaaattagtaggtttggttggggtggccactcgcttacaatggccactcgcttgccgaatacgttcacgtatttcacaagcgagtgacgcagtcagaaacacgtagtaaatagcataaactacaaccttatatatcaacaacaacgtccttgtttgatttcatatctattcgatagctgttgataagaatttaaaatgatatataacgtaattcacaagcgagtggccaccacaagcgagtggccaccccacctaaaaacgcgtccatgaattaggacttagttagttcaaccacccaccatgccaccaatacgctctcaatcctctacaaagtcagtagagcaagagggtaggatcttattagctatccaggctttaaagaatcaagaatttaccagtatttctctcgccgctcgtactttcaatgtaccgcgttcaacacttcggcaccgcctcaatggtatacaataccgcgcgacttctcgcgtcaactctactaaattgaccgcaattgaagaggaatctcttcgaaaatggatagtctctatggattctcgtggatcagccccccggccctctatggtacgagaaatggcagatcttcttctcaaataacgggaactaccccgattattttagttggcgaaaattgggttacaaattttgtcaaccggtaccctaccctctcatcccgattctcgagacgttacaattacgagcgtgcgaaatgtgaagacccaaaaatcattggagaatggtttaatcttgttcaaaaaactatcatttaatttggaattgacccggacgatatctataacttcgatgagaccggatttgcaatgggattaaccgcaacggcaagggttattactagatgtgaatactacggtcggagatcacttttacaacccggaaatcgcgagtaggtgactgcaattgaatgtataaatgcggtagggtgggccctccctctgtgtattatttttaaaggcaaggtctttattgaatcttggttcaatagccttcctaatgattggcggtttgaagttagcctaaatggttggacgtctgatgaaattaaacttcgctggctttagaaactctttattccttccactttatcgcgtatgaagggaaggtatcgacttttggtacttgacagctatggaagccatttaatcccttaattcgaccaaatttgtgaggaaaacgatattataccaatttgtatgctaccgcattcctctcaccttttacaaccacttgatatcggctgttttgcggtcctaaaacgatcgtgcagtcggttggttgaaacgaaaatgcggcaaaggattaaccacattgataaacttgactttctcgaagcatacccttccgcacgaattgaagcttttaaattacagacaattaaaaatagcttctcggcagctggtttagtacccttgttacccgatcgggtactttcaaagctgaatatttatcttcgaacgccaaccccccccccctccccctagccggggtagcgatttaagccggaattttaccccaaaaaccctattcaatggcaaagatctacgtcgacaggcttcttcaatcaaaggtttacttcgtacccaatctcgaagcccaacaagcccttctaaacgtgcattaaaccaacttatcaagggctgccagcttgcaatgcaatctgccgtacttcttgagaaagaagtaagcgatttacgcgctgaaaatgagaagaagaagcaaaagcggacccgatctaaacggcagatacccgccgcagagggtctttcggtccaagaagcttctgaaatgattgctgggttggtggaagcatcagaaatacccctagaccccccgagcggaagcactcaatcaaggttagaaccacgtccacgggctgcaccaaggtgtagtgggtgtggaaagacagggcataagatcaataggtgtccagataaatgattctttttagtttaatgaatttaatggcgttatggttgaaataaatgcatttaaaaactagattgttgattggggtggccactcgcttgtggtggccactcgcttgtgaattacgttatcaattcttaggcattcaatgggctgtaatatcatagtatcgaaaagtacatcgctctaagctagaaatatgtatatccttatcactgattagtaaaaaattctctaaactttatagtgagactagatgctacctaaaaaccattagcctgtatggaaacaccccaatagaccaccgttgttggggtatcaagttgtaatttatcccatttactatgtgtttctgactgcgtcactcgcttgtgaagtagttagttaggcctcctgtctttcctgcctgaaggataaagccacaaatgtaggggttccgagttttccccactgcgatatgtagtcgtccaatcggttgtgattgttccgatgctcatgcatctcgactcgaaaatcttcttcacttggaagtttcctttatctctttagcatcaatctcttcgccattataccactttttatgcctcagtactgttatcttttttatattcgtggtaccatcgtagccgacaatgaattcgagagaataggggctgatgtctataactcgactagcaaataggtccgagaaccctaataactgcttctttggctatgtactcttcagttgtctatggccatgcatttaaaggactactggcccattgcggagccaagatgacgcggtctgggtaaggtgatttccgcttttcgctagcgtcgaagaacatcgtcggagcagtgaagatcaatattagtatcatgcctattgagtgatatactattgtgcttatagaagctataatgagtctattgtcttaggaaaggcggtctaacccgtaaggtctcatccatcgtacaaatataccagtttattaatcaaggggtgatcggccatatacctttcaagggttgtttttgaaaacatctttgctgttctaactcctaggaaaggcctcctaagattcggtcccccctcgggtcttttgtcttgaatgttaaatagaatcataaccctcaaggtgaagtaatagcgggaagctaccaattctgctgtgcttcatggtcggcccggcgtgtatctcgctactcttgatctcggtatcacagctgactcaaagtgaggaaattgtccgcgatgaggaaactgcccgagatcactggtaaaggcccgatggagacaatgaagactttaaagagaaatattccactggagattcactgtggattcaatgggtgggctgggattcttactacacgaatgtttatatgcttaacgagacgaaagccaacctgtacgtgaatatatggcacctagactacgacgcgttttataagattcttacatgtacgtgatctccagccatagacttttgaacaataagctaaaaatcttgtaaatagcttcgattgatatctcgacttatggatcttatgattggaaggttgacattgatgacaaatacttgatgcagactaacgagtacgcttttagttttgtgcctgacggaaagcgctttaccacctatggcgctaaaatatctttaccgggaatccgtatccagtctaagtcgattacgtccttatccacgttgctagctattctaacaatgccctcgaaagcggtatcctctggtatgtatagacttttaactggcgcgaaagtagggatcggtattggtgtgggcatagggggcttggcgttattatttataataggatttctcctattgtggtagcgacgaccatcctcacaagaggtgaccagggtgatagaggcttctaagccaggctcggtctaaatactggatgacggcttctgctagaagactagactgctgccataagagctacctataggatctgtgttgccggctgagttagtatcgacgtataggggatgacatgagggcatgctcctaggctttggaaataccttttacttattcagccagcttattgaaaattttgagatattcgaggtaactcgatttgcgaaaatgctatttcttcaccatttctatccccgatttgtctgacatatattgttttatttctctgattactactgtattgattgaagatcatgattgaagatcatgatgaagctggctttcacatttatatttttgcttgtcgagaggactaatattacctataggaaatcgcttaactaatacttgtacctgaaagtcctttatctatggactggtgcatttgaagtttagtaggttcttaaataccggctcttggttgaaaagcagttaatttggtcgtttaattttaaatagtcatgctatcaaaatataattcaaatagtgataagagtaggaagcgtctcagtcatatagccgctcctcttctgtagcagtacacttccggcacttttcttctggctgtgttggtgggaagtcaaaatcggacacagtgtctgtttcaatctcctctttcgcgatgatctcttgatacctgctctgtagcaactgcgtggcgagatgtatagtggcccactcccggggcaaaatggtgtcggagatcaagatgtggtcggatagcgtttgtaggtattgaattgtatcgttgaccatttgcctactaacttttgtaagacttgggagtctttttcggtataccagtcgcgagctatccggtatttgagggggggagtgtgaatgtcggtgtcgcttttgtgggagagatgaggccgcggctgctctcttttttgtgtttaaagggggcagtttgtggatttcagcctttgtagcgcttcgaggtaatatatagtccctcgggctagtaacagaagtagctacctctgtagctacagacctagtggactggttaatacatggttgtaaaacctggcttgtatggccgcgattttcgtcgatgaactggctaaaaacctggtagaagcctgtatccgatttattgcctttataaatagatttgttagccgatggatttctctagaaggggatctagaataacgttactagcttgctgtgtacgtctattgtgatcttctgtgtctggtgaaccggacctcgctgatacttgtgaccgcttgtggtctatgattggttggctttgatagtgatagtgttgcactggcaaattattggttggagaaaagggagggcacgagagcatctatggtgaggataaccatggccttttaaatgtttggagctcaagcagttaccatcaaggatatatccacagtcaagatttcgcggcttaccgttattaggccagctcctaggactcctagagggactatggacgtcagtatgtggtcctaatagctacgtatgctaacagtcaaatcaagcatgatttaatctagttgccgtatctacatggtgctcggcccacctactgatttaaagcatattcctaggagcaacctggcttacaacttatagatgcttataagtgggaacttgtgaatgggagggcacttctgacaggcccttgactcagctacgccgtgtagccacgataacgatcccactagctgaatctgtttgatgcttctaggagctctgaactctttaggttctttaatcataattcgttcgttaactttatagtattggtgtttggtggtactggcgatatacgtggtgaatggtgttagaaggttgaattaacgttgatatctatattaaatataaaattccaccgaacaccagctgtatatgagttttccacctatagaagatacctatcggagccatgttagttcccttctaatagcggacttggttaaattcccacttaaagctcgtttctttatcagccccgctataaactgaatagtgacggttatcccgtggcctagagacgcattgtaaactggttggtaaagataaagttaaaaaaagagatagaaaatatgtgattttatctcgtgggaaccgttggctaattttcaattagcggcaaaatgcggtcccttcgagtacagcaaaacgggtatcgcgaacagagtatatataacgtttatgggccccggagatattgaccggcttcatctttttgcctcccactctttactaactgcctgatttaaattaaatcatgcttatcgcttggtctgactagccagcctaccgtggccgatattggagtaatatgtctgttaaccttagtcttcgtaatcggctacagctaggtttggaattggcttctacattttatacagaacctctgctaaaccctaacgctaagccgatggtaaaactacctagtcttaatctggctagtctgcagatcatttatatgcgtcacaatggaaatgtaacttatctgataagactaattaatataccgaagcgttgaattatacgttattcgagactgtcctaacttactaccttggtccccttctccactaccaagagacgaatatgcacgacaaaaagtagctcgaaaactgccctcctctatccgagaatctattcgcgatacgatcttgagcaaatcactgattatggcctagatagctagtggtgtagaatgcagcttgagcgtgacgtacggtggatctgagaagcttacttcgtgggactggaaatagtaaaatttgttgagagaaccttgatctactcttcgctaaaactctataccctatgggtttgttagggacataccttatctatcgcgataagagatttatattaaatataaagtgctctaaaaaatcgcgcgttgatttatttctagaggtggagtaatgttatagatatcagttgaattctccgtttggtattaccatcatatgtgttgaacaacccttgtaagctgtgataggaaattaacgcactgagcaatcgtgtatactccgtgttatctttgcctatagcttgcttttcttatgacttggaaaaagacagtagtcttcctttatatgctggtttaaaagtgtaatcctgcaaccgtgtttgatgtccctacccttacaggtgggaccattccacctaccaagcatatctgtccacgattttttgtagttaggatcctatttcacgatatcggaagaccgaagttcttttatcgccggattattgtagtaacagtattccgagtagactccttgctttgtgttcgtaaaaactttttctaaaggtagctctaccgtttcatgacattgaataatatcataaatattcagcgttatgctagacgggaagtgtaccttatatcgagtttgattatatttccagccatgctgaagagcggtaaagaacctttcatttttgtatctgagatcgcctgaataatcacctgtgataagagtaaagtagagacggtttgacgatttcctagggcgataggcgctcaagttatggccaatgagaactggagaatatctgttaaatgtcaaggcaaattccagctaactagtgtctttgaatatctgtttctagaggatagaaccggtatttatgatattttttatatctgctggtgttaaaaagtccttgatacttaactaaatattaagtggggtttcaaagagctttattgtaaatgactgacactggtgccggtgttgacctagcttataccagggaaagtatttatacttcactgggctatttctgaaattagttaaccttacaaaatattaagtaagagtcccgcattcttgtcactccctccggaatgcacctatgcctgtgattatagagctggttaagaatagaatctatgctctatatttctctgaaagttgtggcctaatgccctgcctatctgacccttgcttatttttaccctagcttaagtagataatttctatgggcaaaaaaacatgctgttggtgtttagtggctttcatgtttaacgttgatgtgaacgttgatattaactttctgacactgttcactacccgtatattgccaaaggtggttataggaaatagtagtaggtatcatttccactagccctttgccgaagcgatatgcagtatacaataactatatatctgagtatagtcgttctcgaaattggcttgatagatataatcttcgtcactctgttctgcccctactgtaaggccttagtgtatattaataatttaggggggggggggggggggtttaatttttggagtggnnnnnnnnnnnnnnnnnnnnnnnnnnnnnnnnnnnnnnnnnnnnnnnnnnnnnnnnnnnnnnnnnnnnnnnnnnnnnnnnnnnnnnnnnnnnnnnnnnnnnnnnnnnnnnnnnnnnnnnnnnnnnnnnnnnnnnnnnnnnnnnnnnnnnnnnnnnnnnnnnnnnnnnnnnnnnnnnnnnnnnnnnnnnnnnnnnnnnnnnnnnnnnnnnnnnnnnnnnnnnnnnnnnntgtggtgtgttggggtggggggggggggggggggggggcattaaattgatagatgtcgaaaaaggcgccgagtatgaaactgtattatagtatgtagattaggtatatttgttcagtcgctgtagttaggtgtaatactactcgcaattttatctgccggcacccagttttgagctaagaatgaagcgagactgccaatacctttgggggatacctatacaaagatgaaacggtctgatggtacactttaaagatcaaaatttcatttgcttagctgctaagcttgctccagaactctaagccacggcgtctctgttgctgatatagatcttatactgaaagcttggagtttagatctgatctaacttgtatcttacttgagagtaatcaaaaaaaatgactatctgcgtttggctttattggtttctaattaacttggcttattgttgtatatatagccttatatttccctcttggcgtccagaaaagaatttgtctataaattccctcggctagttatgatgagtaaaatcgagttggcaattgattgaagcgttctaatttgggaagctcggggacttgaaggccatataagccacgcttgttcgataggtgtatcacaggaagggtgtccaaaatccttatttatgctttctttgataatctaagattctatccttgggtatttacattaagtaatgtcatagctccctgcttatgatgtattaagctctccatttagtttcccagttgtgtccaaaattgctcgaccacagaacctgtatcttatcgcggatgtcctcggtgatatcctcccattctccgttcatattttctagtatgtcagcatctataatgtcgaacttatggctagcccagtctcccttggctagatatcctccccccgtaatgccggttgaactgtcagacgaccaatatatacgcatcagagctatgtggctagcggtaattccacagggcaatctggcctctaagatatattgattagtagttaagttccttaggattcgatctttgggatcgacagattcttctatggccgggagagtcgctccttcctctgtgtaagaccaaaatttaaaattctcctcagcaatattgtagcggagaggcttgggtgttactttactctcggcggaaatcaggtggaggctgtcttgctgaatcgtgatagggagattgtctggttttaagtaatccccgatatagatgagccgcgtgctagcctactcgtattcaatcaagtcacatagaatgttggcctacgaggaaaaaagcaactctgataactttctaccaaaaagccgtgttgtgtactcgcgtttggacggataaaccactagctagtattgacctattgtttgtttgtttgaaagaaaggataggaagattgtgggagtgggggccgtagggcaaagttgaatgcttgagagatgctaatactggatgtaacgggaagacggtacagttgtgaattggatgagcttctaatatggcctgtctggcaagatgcttgactcttatatactggtcttgtgggagaatatatgggggaagattaaggatagaaacgtctgtaagggtaggacgggaagtatggtggatgtagcgaccaatctaatcccggaatacctgatgcaagttttgaaaaggtagttgaccctgggagctgatagggtgaatttagtagctggtttacttaagacatcagacatatttggcggggccgtcgactaactatcagctctgcgtagatatctattaaacttggtatttgtaaagagtttacaacggtgactgtagaaatatcatagtcccagtaaatcatacgtagcttgtaaaactggccataatcactatcaaggattgatcatgttcctgcctgtggttctatctgtgctaggaatacacatcttggtcctgggcgttctctcgctcccggaggcattgaaaagggttctgggagcacagttatagatttcgaggggctagataagctcgagggaacctgaagtagcttgggggtcttatatatccacttaaggaactaaggtcatgttttatcaagtgctagaattataattgcagctcctggcgttacggctaagccctgggagtgattaaataacgcagatttgtgcgtagatctggtgaggatgtcttgtgagggctttctacgaccttagaaggtaagatattgattctaggaccctatcttaagctcctaggctctaattagctgatatcgatatttccatttcttcggtcgccgccgctaggtatgatactactagtacttttatctaccgatacttggtttcgtgctaagatatatgtggaattaaagcgaacctgcttacaccgtttgtgggtacattgacatctagtatatataaaggtgaaattatcgcgtgctgtcggtactccggagtttaataatcaaatttttaaaccagcctggtaaatcacgtgacctatatgtattaaggatgacggtattcatcctagattctgatagttgcaaaggctgcgctaaacccctaaatcacggctatgctctctgttgctggccctaatgccgagcgcttggttaaatggaatcaagtgattgatagtcgcttcgctaatttttcattttcgttacacctccgctgcaaaatataaatcatgtatgctgagtggaagctagtcgagccgaccggcgaagcggtgtagaggtagaaaggttgggcggtagatgagcgcctgctagtccggctgagcgacgggctgtttacctcactccgctcgactgatctcccttagggccccactgaccgctgacgcggctgactctgatgagggtcattgggtgatgaattcctgataacggtaagttctctgttgggagataattgacgggtgcactgacggctcttgtctgtgttcgtgaggtgactggtcagtgctgtctgatgtagggcgtcccctagaggctgacgatgtctgacgctggctagggtcactgtgaggaatcacgcagatagtaaataggttccgaggtagtatagaagatattgagctgatagtaaaggtagaaaatgattcgaatgggtattgatgtcgcgcgatctctgtaaagttccctcgctagctttatatagcattattatgggatctatactaatatcacgcatcgctagtaacgtggaaattctcccttgaaacagttgatacgtcgaagaatgtactttgatatgactagagctcctagggaataatcaccactttctaggaataagatgagtcgggaaactagctaagttaaacctcttctacgcggcatgtactggcgaaagagcaagatgaaaagtccactgggtactttctgaagattatatatatggtgtcttccctctatggtaatatgcaccagctcacaatctgtatcttctccggtagattatatctaaacctcgcgattgacccgagacgcttttaacttcactttttcatcatgtctaggaatcctgctcatctacaatgggtattgggctaagtcttaggcgatcccttgcaccgtgagcggtgtatatgggtaggagatgataggaatcactgttgaaataccgtgccgcttgactcctggattaatggagtactgtgctttcagctgctctagagctctctgtccgcgtatccactagcgcacgagtttgccttggctgcaaagcagttactttgctttgagtgcagacgctatcgctgtcggctaaaagggtgggccagccaaatattggatatgttggatatgcgccgagactaagccgaagatgctatgatttactcggaatcttataattcggctagagtggtatatcaatggctaactagcattccctataatattgtcacagccgtgccccctaatgaggctttctcgaaaaccgaaagggaccttgtaaagaaataaaactagcgataaactcctccttggaatatttgggttggcctagggccgtgaaaatcgaggatccggaccttctccagaccacaagcggctttagttgtgttttgtgctatatgtcttcagtacaaaccgtggaatttatgaataacgaaagtcggttactcgtctacgcagtatgatcccttaagttcccttatgcacgagtttcgcacttaagtgccatctgaaagccctgtgttcttacacaaccgacccccaggctgttgctccccttctaggttgtggaactgaaaaagagtatggttccaggctgctttgtggatgttcgcggtagtggatctaaaccgatcaaggtctttttgtctcgtttttatgatctgttatctttattgggggcacctctggggatggggcggcggaccgtcgtgtatgttccaatttagaagcggcggtaggtgtatgtatctttgggagagattttgatcgtctgatactgagaagaaaagtatctttgaatttatggagctttcgcttaagcctctgaaatctcgaagagaaaattttccctatattactgtcaacgtgcttatagtgtaggaaaggaggatggcagttttgaggcggttgttgggatctaggaaataacgataatatccggaggcttatataacacaaaatcatattatagcactcatcaaatgcttttggtgcagtcactaagaaagattggtagcctagaagagctagtgaaatttacttctggtaggtccatatcataatacgagattgggttaccaacgttaattggtatcaatattatgcttaaccacaatatacctacatctctttgttttaaatgtattgcggttaaattaatgggttatggttcagcgagctctacttgatacctagtatgtatatatccaatgtatcagaggtctacttgtaaactgcctttctttaggaaataggtttggcaacgatcttttttaacgcttaagggttttattttcgtatatcggtgaagaatccggtgagcagctggcgagatccagtataaccagttgagctaactatttactggcttttcgaaagtgcggtcgatcctaggtggagaagcgttggtagagataacggtagcctcggcgtgacttgttagctataaagacccctaagtacaattcctgatccaatccatcttgatgaccaaaatggaccatcctacttcgccttccctaattgatcggccagctaaacgatagtgccgagtatcttaagctccagaagatggacccatgttggaaacccatctatagcaagccttaaacggtataaccatcgaacccaatgtctgttatacccctcccggcaggtaatgaaaatacctactaatactaaatagaatctagtgagaacacgtgataccctgacggcagagttcatgaaagtattaaaccttaatgcctcccgcgctataccggtccttaaattgcttgacttgtacttttgcctatgggaatgctatgtcgtcaaatcggcgtagaaaatacgactcgaggaggagcagcgatagctttaagcgttaaatgacttgctagtaagcgatagcgatatccttctatagctctgtaatgaacaggtattagtaatatgggaccgcaaatgagcggtgcaggctctttgtaacggtgttgtttcagccttggaagcgagcgatctttaagcctactctgttggtgagcctgagccttgattaagtccctagatggtagagcgtctatgggtaggaataacgacatttgatcttctaatagctatttgcgctatctccttaggatcaacgctagcgttagctaaggcctatactgctggtgcgcattcgttgggtttggtgacgggtgccaacggtgcacggctgttgatatatctaacgtgttcgataacttcatatatggctatgtactcccttagtttgtcctgatgttatgtaataagaggggaataaaatcactgcttagcctctagcttgcgattcctctaaacccacgtgaaattgctgcttatataccactgtattttttctgacgcattgagacagcgagctttcgacgaatatgaattcttgagcaaaatttgtctgtacccgttgtcttaatggccattttgtgctgatattagtagactacgatttggatcttaacctttacgctatctggtatgaatcctctagtatgccgacgacgcctccctgtcttgcgattaatcctattgatctgccgcaggttcttatagtaataataatgaatgataattttgaaccttgttaccttcggcgcccgtggctaataatatgaatggtcatatgtttaccccgctttggttgtaggtttgcttatttctgtcttcgcttttgggtatgataataagatcagttatttatactgaatgttaaagcctaaattgctttttttatgtgcttggccagtgtaaaccttagaagcttgaattcttcactttgatacccgggtctccttgtaatctcttcgagctctgtatataatgtccacgccttaaaacatcgagggtatagtatgctttttggagtttatctacgatcgttcaccgggccttgaagaatcaatataagagagagaagccagagagatcgataaagagtcacaattatattctaacgaagaggaactcgatagcgtctacggacctataggatactgcttggtgaagaggtagctcagcatgctatgataattgagaaccaaaaaataccttggacgttagattgtttgaaaaaaatcatttctatcatgggcctgttgaagcgacgtgctcaatcctatggcgagtggcctgagtcatcctgtagatcagggctgctaccactagaaagaagcagatgtatgaaccctattctgcctgcgaaggctgcgaagtggagcgctgtctagccgtggtcatgcttaaggtctattctaacgttggatcgttctaggatgccgttgaggaatagaaattatagtgacagtttggagtggtaaccgtttttgttacgctaacttaagtatatacctgagtatagagtagcgagtgattgtttaagatattgcaatggatacagagaaagagtgctcactacttgccgctggactgtatatcttatccctttggtactggtgtcctttctacttggctagcggtaagagtaccctccgatactccgcaaaagttttataggtgtaaacaactctcctggttggaggtcacgtatgttgcaagcggcctagtaggaacttagatattgttgaataacaagttgatctgcactagtgctaattcaaatatataagttaatggctgaagaataataagtgagtttaacgtagatgtagatagttgtggagtcgtcttaccgaccgatagtgaaagtctgttggtcctggtgagtactagggctttatcactgtttcttaggttctgttatgagttgcttgagaaacgaaatgaactctgtactgtatcgcagaagacttatcagtctctggcatattatttaaatatccttcagctacccttgtgcagctagtttagaccctcttcctacgccctataatctaccctgacaagcaatccggctagatggagaaatatggttagaatggttcgtaccacttgatttgatttaccgcctgtgcttatagcagactagattgcgatttcgatctcgaccttcacgcaatctggcacgagtctccctgtatatcgattccagcttaaatccttaccgcatttcatgacattgggctagattttcctaatctagcgaaacctgtggtatatgagccttaagaactgcttttggtcgaatgcttcttcctacctaatcatgagagccagtcgggctttaattggacgggtctggatcctctgtctttctttactctagctgacgatatcttcctttatatattaatgttgcttctctccgatgaggtatactgggtggagttccgacttgcacgattcgattaggtaaccggcgagagagtaggcgagtatatgtttttcctacttagggttgaaacgcttatggggaacttacgccgagtacgtgggcatatattagatattacctcctaagctgctgttggagcgatgatatcttatttccgattgttattgatacctcgttcggaagcactgctatattcgagccactcgatactttctccgttagctatgctacccccgatgctatccctggatccgttattttctgtatataatctctaggaaaattacagtgaatgagcctaggtcgtttaaacatggttgagaagtttgtatgtttgcctaaataacatctccgatgctcaccgccgcctgcagatagttgtaagagattcgcacgattttattgtaaggtatccggttagaaggttgatactacgaatggatagcgctacattgatttttataaatacttgtctcgattcatatagagctgttaggtactgatatgttaggctgttcttctggcaaattctctcttgtgtccttctatatccattaaaacggctagattaccgttcgaacattgattccagtcccagaaaacgcccatcacagacgacgagccgattttaagcacaatttatcttaaactagcgctagtccatcttataggctactcttttatacatatatcaccgcagagccttacagtggtaggacgaatgtttcgacataatcggaaatgtgattggtgttaatggctgtttgggctttacaagctgctggacatccctatctctattttaataataattaccatattagaccaagcttctatatagccagacttggtatacaagagttggaagaagggttattaacggttgtgataccttatttaagactgtgggaggccaaaacgcccatattgaactcaaccttacaagtgtctatttaatcaacaggctttccgtctatcaacgtcttatcattacaaacaaatctatataggcgcagcctaacgtagaaaatagcaatttatattattcaacgctattcataggaaggggaacattaactcagcgactcttttcactccataggatgaaagtgtgacaatgtgggaatccaaggatctcaatctttgctaccactgagccgattctattaactttacctagctagtcaatactccgtggatacctctagccggcatcctatgcttacatcccagagtctacatcccttatattcgaataatatatcgatcgtgctataaagtattataccgtttgctactttcttcttattccacaaccaatatttgcaaacatgctatttacaggtgggggaccacagataaaacgacaaatcacaaaaatatactcgtaaataggggatttagcgtttccaaacgacatacaaattccctgtaataaaattgtaatcgaagcccctggctctgtcgagtggcctggtataggattcgaccaaatgtaacggcctagttatcttttaggcctcggattacccggtgcaaaaacactaaggcggttgtgatggtcacttttaagagtaaacgggtctctcgattgatctagattacagctattgcctatcgcgacctgtgatctattagttcggatatctacctgccccagcgcctcacatcctgctagggtcacctttacctcctggggactttaactaaacacctacagccgcttgaggtaccaaagcacgatacccagaatacaccttatgctagtctaaaatattgcctttactagaatgagtgctacctagcggcatagatactatgaaaatactaccaaatccagaataataactattttttcggcggagaacaaatagaaagtttagacctcgttacaagccaacagtaggaaccgagcccggtttccaggacaaccatatgaactattctagctattaaagcctatagttaggttcctcgtcgatcgccacccaccttacgagattgcaacgctactatcgcactctaataataccttaggcccaacaagcagtcggactaatcaaataacacgcgggaatgtgaatgctagtctaattccgaggtggaaaatcctagcggccacccacggaacagtagattaatgaggtcttatttgtgctctataggaagaattggaaagatttacaaatttccagacgcgatctataagcctagacttgatggcctgcgaataaaatggatcttgatttttttgagaggcgctattgggccagggcaggtatttggaatatggtgcagactttggtgacagaatagaaggctgaatcccgatctgtggtgtcctcctagctcttacgagagtaagttcccctcttaagctgctctgtctatctgctctgtagaacgttctcgaaagtatgtatcttctcctacactaaccttcccctgatgaccaagctatctttgagccgaatacttcctttctatgtgccccaatttgatcgctagtctgataactctagctgacggccggaaaaaatgtacgctaattttggaagactacgtgagcttatgtaatcctattccgccctttgcattaagctaagataccgatcggctccgggatatggcagaagtcggctttgtgggccggcctatttgtggtccactatacagtgatggtcttgtataatatccacaatttaggtagaccgatattgtggtgaacctaccccggtttatgaagtaatctctcttgggacggtaggcacagatttcagtaatgccaaaaagtcagtggagcagaagcctaagctttctatgacgatcatttatgataaccgtattctcgcatggaacgaatttccttggtttatctaaactatgttatcaaaatgatttgcggttctacagttgattaatagtcccgctcgggttccacggcctttgtgacactctattttgttaaactatgagcttggtattccctcgctagtattataattttaagggatggtgattttcatatttcttgatatccgtgaagtgatatatacaacctctcctatacttatattttactgtagcttgtaatcttctgatatgtatcgggcctgtagagaggattcaacttcgccattctgactagacgacttcgctctgtggggatatagcgcttgtattaattagtagtaaaaacagatatttgaagccaattgcataatctgaatcccgtatcgttgggcaaggtgagcctaaagccccgctccctctaggtcccatttaaaagctaagatagtaccgttggttgatcagaagccttctaaagcttaatgatatgacttatggacccccctggtcagtgtatttggtaaatctgacttgtgaaatatcgactctgtattgcagaatccctcagactcccaccaatagaataaattccaaattctaagaacaagcaatttccaatttcatacttttacagaattattcttagatgtaaatactgtacgttaaaataaaaccagcaacaaattctcggaccaagccccaccgggtatcgaataatataacagactttagaggcaaaaactttatctttcggcaagtttccttcccctagaatcgaatacccttcatgactgattggttaaaatcgattccaaattgcgcggctaatcagaagtacggacagaaaacaatagacgttacaaaatccgatcgtaagttttagtttaagaaactaactctctataaagcctatatataaaggcctgtgcgacttctttaacatttgacatttaaccgtaactagggacactcgttttctcgttacaattcaggcgcaaatatagatagaatgagagaactcccaaattttaatcaagaatactttcgaagccaattgcaacgtacactatctatttcaacctccgggtctgagaatacacagagtccgtcaaggtctgcagcaggtgataccacagaggagtcctcttatcacgagaacgactctttaagcgacctacacaataccaactcagaacatcctccgcaaatctacagtataggccccacatctaaaggagagcaggaactactccgagaggctgatctatctagagattacagtatgatcgccttccactatatcgcagagtaagtgctgcgattccccagaaataatattttgtggtatggctacttacgacactcagactagatatccgaacaaagtcagttatacgacctaccagagaaagaacaaagctgatttagtagcaggactatacaaaatctattacatgaccagagcggctggattacaactattcgcagtgatctaaaggatatccgcagtcagttagcaggtattaagatatacaaaatctattacatgaccagagcggctggattacaactattcgcagtgatctaaaggatatccgcagtcagttagcgggtgttgagacagctctagcgataatggctagagggggggacgatactatagagagtgatgcaaataggcgaacgcgtcggccacagcagtaattaggatcaaatatgatgattaattttaactttcagggcctgctattagcccttattggccgagatatcatgattacattatgctttacgaccaaccatatctcactagagcagactcgggctctaaggatatatataactgtatggcggcggaatagtaggcaaattgccttaagatgaattccccctcaccagtggtagtcgtaaacagatacaaaaagatatatcattacagttattagaagttcaaacgcttagggatcattttagccacaatcctctccctagcccactggatcgttacagtccagtagtggatcgatttgagatatatagactcggttttatagccttagtagagtattcccaatcttatgacccaagatagcccacttaattgagtttcgatttataggtgaacgagaaaatactatatttcatactagaatcctagtcggtcgtttgggtttctattatctaccgagtagctataagcttcatataccaagggccgtagcggccagtaaatttcttcataaatagagagtcacatcgcctattaaatgataggtagagcccacagtcacgaggaaacagattcagttgcttccggatcagcgtataatctccccgggatatggaccctaccgctacgcccatagaaccttccctctgcctcccaagctacgctccgcggagcaaaagtctaattatcaaaagatttacatcaatatttcttatatagcagaacagcgatcaacatcaaccttacctctttatttttactggtatcataagatagcagcttattccaagagctatctctataggttaggtatataagactaactaggcggttcctccacaatgaatttagcacattcctaacccctaaatatatggtgtttcacacaagtgattcataatggtttcctagagctacaggctcctaggtcgcaaccggataatcacccaaggcgggaaacccgggtagggtattatgacctagagctccaagcgacccgtgctactcgggccaacttccgtacatcaccgcagagtcaggcaaatagggtactggtccaggattctgaatgttatcaatcgtgctcaagacccgagtagccgccgataccagctcgctatacgtctgatataagaccgcctgaatgtcgtgccataagacctgatcctccatagtagcgttcgccgactcctactgctgctgtatctagaagagctctttttcaaacctctcgttctcagccaaggctttgtctcttaccataatagattgtcatagttccgaagctccctaggccttttcggccagtaggcgctgaatcacctaggagtcataagctctctctttatccatcttcccaagtgctcagtcgaactcttattagacctagtccatcacatccaaacattttcgatagatcgccttataagctttcatctaggcgctttttatcacagaatatccctaaaaacgatcgtcaggtaagaagactttataaatagagagtaacataccagccctttgtatagcttggctaccggcttaagggggtcacagtctaccttagatgtagggaccgtcgaccgatcagaataaggcgaatcggtacacaatctgccagcacgaggctttactttagcagcaccacggcctgcgctattcccagaggacttagagttatgtgccataatggatccgtccgttcgagggataattgctaattcatataatacgccagacaaaccacatttgagtgcggttacctcctagggagcaccgattttaaaggcttaggtggggactaaatcaaaagatctgaaacgaggtgaaataacagttcgcccttaccaaggctttgttactagcatctggatcgtgcctattaggtattagcacgaaatgaaaaagaaaataaaaagaaaatagaagaaaagaaaaaggaaaatatggcgatccattatagggggattaactagggccgacacagaactacattcatctaatcagtggtatctcaatacccgctctatccaaaataatctaagcctcttatagttaacgccctcacattggtctatgaatagagtcgttattgagtaataacagtcatcctcgccctctacgcccttttttgataaacgtttacaaaatttacatttacatctacgtataactctcatattaaacagtaaacttccaaaagcccaggtcatcatctgtttagtatagaagtactttattataacagagttaggatctagattctcggaagctccaccatcgcccaaaccagggcctggtttcccggacaaccatataagccattttagctaccaaggcttatgaaactctaccccacaaaaattacaacgctactatcatactttataaggccctaggccacaagaagtactagtagcacagagaaacaatacccccgtaaatgtggaccaaggatggtacatacagttctacgatgaaaagctcagcgataatccatgggacagtagatcaaggaggttctatttatggcctagagaagaaacagcaaggacttaaaaaggcctagtacagtctacgatccaagacatgacgggctgtttgcatgcggatggaagaggtcctgtgttactttggcttactgaaagggccaccctcataggtacagtgggggcaggtataggatttggaataccatacagatttccgataacaggtcgacgacattatagcgactatactttaacacccctaaaggttgctactataggttagatttaaccacagttaatctagaaggtaagtagggcggaagtctatagaatgctttctgagttgaagcttaaatccaaatgattcatgaataatcacgtttttccccggccgagtatttccgcggttcatcaaaacaattcgtccatttgattttggtatttagctaacagtcaacggtcccgctcttagtttcacccttattataaggttaactttctccgataccttaaatccaagggtccttcttctagctgcactagaacatatcgttgaacatatcgttgaacatactttttattaaacatgaaacggcgtaaatcaatcgtatggctcacagctctagagtttagaccgccctacttccgacccaccgaaccaattcactatgctagaactatagactccaaagcttactccttcaagtcgataaaagtccagacaccatcataggctctcaggtagcctttattagctttcatatcataagctcataaccaggatacatatgtctttgttccatcaggcttaaataaatctagctatagcctccattctcaagttccagcttccttctactcgtggaaatccctaagtgagcatagatacagtcataaccagcttacccccgcaagtgggggctatccttatagagaatatctcaatcgttcagattgtgtccatattctcgatcggcgcgtacaatgtcttggaaatagggattgtcacattcgatacatttaagcgctaccggggcctgtatttctagagtatacaggttgcatcctggggaatccttgtgcatgcgcttcctgccatggcccatttcatttctcaagcatccaacctccccacagcaattcccttcatgatcagatggtacgccatggttaccggccaagccgttgtactctactcgcgtctatacctcgttatctccgacgcgaggaaggtgcggtgggtcctatagatgatcattaccaacgcttacatcctctatattccaatgaccgtcctttttttcggcctcaactacagcgacacacgcttcgcccatcctactgcgatatttgaccgggttcaatcaaccggcttctgcatccaagattttattatcagcggtatctacatatataaagcagcgcgtgctttcaagattatcattacactccgcagtcgcgacggccgcaacgccatcatccatctactttatatcaacattctcgtcgtgatcctgaacgttctactcctcctaacggagtataagctccactacgttcaagtcagtttcaagacggtagtatacagtatcaagttaaaactggagttttccatgctcaaccgccttcggttgctagtacatacgaacccttacatttgtcagcgtggacccgagggctaacgccgaccaagcgataggaatattttcggcaaggtttcttcacgatcacttaccgcaccagacatcagagttcaacctagtattaccgaagaagagctaccacaacattcactgcggccaggtaatatctatggataccataaagagcaagttgaaactagagttttccgtactcaaccgcctacagttgctagtacatacgaacccttacgtttatcagcgtggacccgagggccaacgccgaccaagcgataggaatattttcggcaaggtttcttcacgatcacttgccgcaccagacgtcagagttcaacctagtattaccgaagaagagctaccacgacattcactgcagccaggtaatatccatggataccataaagcactacgccagatatcaagcgatagtataatactccctgaagatgcttcctattcaggaacactatccgagggtcactcaagcaccccttcaagtagctcttcagagaccctacctaggctagaattaactctatcgcaattctcaccaaggcttgacgtctgagcatcccacgaaggaagcttcttactagcatcggacaagctggcggcaccttaatccaagccctccatttgaaaaaattttacacggtataattagtgaatcatacttcagatgatacggttctatgattgctcagtagatatcgtcgacatcgatatatcagtacgatagctaccaagagactcgcagattaagatagaatggttatcacgtttacagtccaataaagagcaaagcaatatataacgaattaagcctcgtatcatttacatcgaagcacatcgttccaaattattcgccataaccccatttattttcagcctacgcagcctagcaatagaatcgttattctgcctacaaaggactatcctagaagacaaaggtagctaccagggaaggttcagattgaaggaaacaattcttatatagctaaataagcacgaataactactaaggagttcgatttccttccaattcctactatacctttcgtttgagatacctaatcctagattttgctttagtcaatataatcagctgtgtcttacaataagataggttaatattttcatataggtctacaacacttatacgtgaagcatcaacactcggtcgacagagcaattataagggggctgttcagcaaagttcaaagaattatgatttacctcacttccaaacgaggagaaagtatagtagaagtctatagaaggtcaagttttcatatagagtgataaagggtaagtaatattagggccaatttaggttataaggtgcatcataagtttaaacgtccttcgatttatatacatttcggagatatatcaagctctagccaatcctggtataaccttttatcacatggaatttagtcggatttaacagaagaaggccatcatccctcctactatgatactcatgaagtaatcttttctttcgcaggcagttacattttcggcaaataaacgttggcctagacgtggttcaatagtatcggcaatcctaagaggtacataaactgcatacccatcactatggctaataactcaccgggaaaatcgaccgacgacacgcccaaacaatcgcttactttttctcctatgtttatcgccaacatggatggctgttttactagacagaatgtagacattcgtcttccttagcctagaagtattgttatacataatagcaacagcaaatatcgtccgtataagggcgaacctaaatttagtcccgttcccatcaccgatacagtcgacctcagggatactgactctatcacaggaaattccaacgatagcttatctgtatggctaccagggtgattaagctcacatatatatcggaacgtgagatcgggttctacagcattgagatatatagactagagtgtgcacatttatctggctgaatcgaaatcgcccgcgaagtacaaaatcctagtctaatattcgtgacctctcttattgattcgaaatctggtctcaatagtctcgttccagcaagggaatgcatctacaaaataatgatcgtatttttacccagttggtatgatcatatccagtaacaaataaaactccttacgttacaaagaacctagaataccgatacgtcaaaacagcgcgcaagttaagtcagcgtctgcagagtagtcgtacaactatcccaaatttgctctaggtatttagtcctaaaatacattacaaactaccaccgacggcaccatgcttaatctatcaaatatccgcccttagctttacttaagtactaatcacattgtatccaaacagcaaagataaaagatagggccgcaagatctttctcggcttggtagaccttcaaggaaagagccaagtcgacaccaataagtcattcgttcagcaacacacatagtaatatttgataccgtgataagcagtcttattagctacactaaccaataatttcaactcaccttcgcatgaccctcaggtaaaaatctcattctatcatattagctaagaatggcataagatggaatgagcttacctgtaagatttgctcaacggagacactttccagctaacaaggcagattttgaatttccggttcccattcgtacatacaattcttcaacatcaatttagtaacaacatcagctagagcgcataatttcgtcatcgcaggattcatttccaattcattaatttagcagctattctcgactcccactaaagaaggttagcctatctttatcgatatagactataccatcgggtgcctcactgatcctgacttcacccgcccgtataagcaggatggtttccgggcccagggtggcgagtgctcttccgagcccgcgcagatattggattccttctaatacctattcaatattagtctcaaatgtacctgcaagacaattgtatttaacacactggcttaacaattccaacgagttcatcggttgtaatagagcagctagaggctagaatgtggctcactgacacttccgttagttcccagattaacgtgcacaatgcgttatagtggtaaacttagagcaattttaagaagcttggataagagattccttccatcagttcttaaaaacctggggtaggagagaactgttattcaagttgttagatatacaccaactttcctctgttcatcttatgccgggcaaataccaaagaccgatcttatgatctagcagcaggctcgaaagtatcccatggattctagttaagttgtggaatacttgcagttgagcgaccaaagcgtaggttcgttaaaacagaggcgattgcagcggtagtcattatctagatatctgaaggttggatacccagagaggcagttggttttgaactcagctgctcatggcaggaagactgatccagccatacagtaggcggccggataggtttagcctgcttgcctttcatattactgtataggctttgcggtataaaaagacaaagtaagaagacaattcctaaggcaactaagactctttataaccctagaacatttcttcaatatatgcttttcttactcgtaacaatattttcaatagcaaactaataacattagatctttcccactgtatggtgaaataccgcaagtatataaaggtacataacggcccgttgatttaagcatccgtttccgttattaatgtccaaaagatagaataccgtcgtctatattagaaggtagtttatttaaaaactgaggttttgataagtctcatcgacgattgagattatgcggaactaatttaggattaattaccccctcaaatgtactgatactcggtggttacaataccaggattaccaatatgactttatttaccacataacatcgaaaagaatgtaggttctagtatacataaccattctgttcttattctagattatgtgataaggtatcccttttatcaatcgcagcaaccgtactcaccgctacggctctattctgcagaggatatcgaacaacaaaacatacatcatagactttcatcaaccattttgattacaaataggagcagatagcataaattcagccatctagtggttatgttatatttcgaaatccttcaaccggtatggtaggttcgatttgtatatgggtaggaatatgagctgctgtgacagccctaactgtactcagaatccaccgcataaatgtagggtttaccaaagtaaacggcagggcggcattctttcagacaagcgttccggttgttttcatgttctgagcggtcatcattatatattcgacaatatggtggttcataattatatcacgtacaataccttcgattcttaaaatggttaacctataaactagcaacctagattttcatcaggcttagtacttagcggttttatgccaccggaacttcgaatattcaaaatcagtttcaactccaatttctttttccttattacagaaggccctacttcaagtaaactagcccaccatatttccgccagactctcatacatcaatatatttttaatagatcatggtagattacacgtaatcccacagaatagttaacaattgcattcagcttccgcaattaacgtcaaaccctatcaacttcaactctcattttcgaacaatttttcaaaaaatagaaggacgagttacataatacctagtcatataaaaaatccgtagtgagatgtnnnnnnnnnnnnnnnnnnnnnnnnnnnnnnnnnnnnnnnnnnnnnnnnnnnnnnnnnnnnnnnnnnnnnnnnnnnnnnnnnnnnnnnnnnnnnnnnnnnnnnnnnnnnnnnnnnnnnnnnnnnnnnnnnnnnnnnnnnnnnnnnnnnnnnnnnnnnnnnnnnnnnnnnnnnnnnnnnnnnnnnnnnnnnnnnnnnnnnnnnnnnnnnnnnnnnnnnnnnnnnnnnnnnnnnnnnnnnnnnnnnnnnnnnnnnnnnnnnnnnnnnnnnnnnnnnnnnnnnnnnnnnnnnnnnnnnnnnnnnnnnnnnnnnnnnnnnnnnnnnnnnnnnnnnnnnnnnnnnnnnnnnnnnnnnnnnnnnnnnnnnnnnnnnnnnnnnnnnnnnnnnnnnnnnnnnnnnnnnnnnnnnnnnnnnnnnnnnnnnnnnnnnnnnnnnnnnnnnnnnnnnnnnnnnnnnnnnnnnnnnnnnnnnnnnnnnnnnnnnnnnnnnnnnnnnnnnnnnnnnnnnnnnnnnnnnnnnnnnnnnnnnnnnnnnnnnnnnnnnnnnnnnnnnnnnnnnnnnnnnnnnnnnnnnnnnnnnnnnnnnnnnnnnnnnnnnnnnnnnnnnnnnnnnnnnnnnnnnnnnnnnnnnnnnnnnnnnnnnnnnnnnnnnnnnnnnnnnnnnnnnnnnnnnnnnnnnnnnnnnnnnnnnnnnnnnnnnnnnnnnnnnnnnnnnnnnnnnnnnnnnnnnnnnnnnnnnnnnnnnnnnnnnnnnnnnnnnnnnnnnnnnnnnnnnnnnnnnnnnnnnnnnnnnnnnnnnnnnnnnnnnnnnnnnnnnnnnnnnnnnnnnnnnnnnnnnnnnnnnnnnnnnnnnnnnnnnnnnnnnnnnnnnnnnnnnnnnnnnnnnnnnnnnnnnnnnnnnnnnnnnnnnnnnnnnnnnnnnnnnnnnnnnnnnnnnnnnnnnnnnnnnnnnnnnnnnnnnnnnnnnnnnnnnnnnnnnnnnnnnnnnnnnnnnnnnnnnnnnnnnnnnnnnnnnnnnnnnnnnnnnnnnnnnnnnnnnnnnnnnnnnnnnnnnnnnnnnnnnnnnnnnnnnnnnnnnnnnnnnnnnnnnnnnnnnnnnnnnnnnnnnnnnnnnnnnnnnnnnnnnnnnnnnnnnnnnnnnnnnnnnnnnnnnnnnnnnnnnnnnnnnnnnnnnnnnnnnnnnnnnnnnnnnnnnnnnnnnnnnnnnnnnnnnnnnnnnnnnnnnnnnnnnnnnnnnnnnnnnnnnnnnnnnnnnnnnnnnnnnnnnnnnnnnnnnnnnnnnnnnnnnnnnnnnnnnnnnnnnnnnnnnnnnnnnnnnnnnnnnnnnnnnnnnnnnnnnnnnnnnnnnnnnnnnnnnnnnnnnnnnnnnnnnnnnnnnnnnnnnnnnnnnnnnnnnnnnnnnnnnnnnnnnnnnnnnnnnnnnnnnnnnnnnnnnnnnnnnnnnnnnnnnnnnnnnnnnnnnnnnnnnnnnnnnnnnnnnnnnnnnnnnnnnnnnnnnnnnnnnnnnnnnnnnnnnnnnnnnnnnnnnnnnnnnnnnnnnnnnnnnnnnnnnnnnnnnnnnnnnnnnnnnnnnnnnnnnnnnnnnnnnnnnnnnnnnnnnnnnnnnnnnnnnnnnnnnnnnnnnnnnnnnnnnnnnnnnnnnnnnnnnnnnnnnnnnnnnnnnnnnnnnnnnnnnnnnnnnnnnnnnnnnnnnnnnnnnnnnnnnnnnnnnnnnnnnnnnnnnnnnnnnnnnnnnnnnnnnnnnnnnnnnnnnnnnnnnnnnnnnnnnnnnnnnnnnnnnnnnnnnnnnnnnnnnnnnnnnnnnnnnnnnnnnnnnnnnnnnnnnnnnnnnnnnnnnnnnnnnnnnnnnnnnnnnnnnnnnnnnnnnnnnnnnnnnnnnnnnnnnnnnnnnnnnnnnnnnnnnnnnnnnnnnnnnnnnnnnnnnnnnnnnnnnnnnnnnnnnnnnnnnnnnnnnnnnnnnnnnnnnnnnnnnnnnnnnnnnnnnnnnnnnnnnnnnnnnnnnnnnnnnnnnnnnnnnnnnnnnnnnnnnnnnnnnnnnnnnnnnnnnnnnnnnnnnnnnnnnnnnnnnnnnnnnnnnnnnnnnnnnnnnnnnnnnnnnnnnnnnnnnnnnnnnnnnnnnnnnnnnnnnnnnnnnnnnnnnnnnnnnnnnnnnnnnnnnnnnnnnnnnnnnnnnnnnnnnnnnnnnnnnnnnnnnnnnnnnnnnnnnnnnnnnnnnnnnnnnnnnnnnnnnnnnnnnnnnnnnnnnnnnnnnnnnnnnnnnnnnnnnnnnnnnnnnnnnnnnnnnnnnnnnnnnnnnnnnnnnnnnnnnnnnnnnnnnnnnnnnnnnnnnnnnnnnnnnnnnnnnnnnnnnnnnnnnnnnnnnnnnnnnnnnnnnnnnnnnnnnnnnnnnnnnnnnnnnnnnnnnnnnnnnnnnnnnnnnnnnnnnnnnnnnnnnnnnnnnnnnnnnnnnnnnnnnnnnnnnnnnnnnnnnnnnnnnnnnnnnnnnnnnnnnnnnnnnnnnnnnnnnnnnnnnnnnnnnnnnnnnnnnnnnnnnnnnnnnnnnnnnnnnnnnnnnnnnnnnnnnnnnnnnnnnnnnnnnnnnnnnnnnnnnnnnnnnnnnnnnnnnnnnnnnnnnnnnnnnnnnnnnnnnnnnnnnnnnnnnnnnnnnnnnnnnnnnnnnnnnnnnnnnnnnnnnnnnnnnnnnnnnnnnnnnnnnnnnnnnnnnnnnnnnnnnnnnnnnnnnnnnnnnnnnnnnnnnnnnnnnnnnnnnnnnnnnnnnnnnnnnnnnnnnnnnnnnnnnnnnnnnnnnnnnnnnnnnnnnnnnnnnnnnnnnnnnnnnnnnnnnnnnnnnnnnnnnnnnnnnnnnnnnnnnnnnnnnnnnnnnnnnnnnnnnnnnnnnnnnnnnnnnnnnnnnnnnnnnnnnnnnnnnnnnnnnnnnnnnnnnnnnnnnnnnnnnnnnnnnnnnnnnnnnnnnnnnnnnnnnnnnnnnnnnnnnnnnnnnnnnnnnnnnnnnnnnnnnnnnnnnnnnnnnnnnnnnnnnnnnnnnnnnnnnnnnnnnnnnnnnnnnnnnnnnnnnnnnnnnnnnnnnnnnnnnnnnnnnnnnnnnnnnnnnnnnnnnnnnnnnnnnnnnnnnnnnnnnnnnnnnnnnnnnnnnnnnnnnnnnnnnnnnnnnnnnnnnnnnnnnnnnnnnnnnnnnnnnnnnnnnnnnnnnnnnnnnnnnnnnnnnnnnnnnnnnnnnnnnnnnnnnnnnnnnnnnnnnnnnnnnnnnnnnnnnnnnnnnnnnnnnnnnnnnnnnnnnnnnnnnnnnnnnnnnnnnnnnnnnnnnnnnnnnnnnnnnnnnnnnnnnnnnnnnnnnnnnnnnnnnnnnnnnnnnnnnnnnnnnnnnnnnnnnnnnnnnnnnnnnnnnnnnnnnnnnnnnnnnnnnnnnnnnnnnnnnnnnnnnnnnnnnnnnnnnnnnnnnnnnnnnnnnnnnnnnnnnnnnnnnnnnnnnnnnnnnnnnnnnnnnnnnnnnnnnnnnnnnnnnnnnnnnnnnnnnnnnnnnnnnnnnnnnnnnnnnnnnnnnnnnnnnnnnnnnnnnnnnnnnnnnnnnnnnnnnnnnnnnnnnnnnnnnnnnnnnnnnnnnnnnnnnnnnnnnnnnnnnnnnnnnnnnnnnnnnnnnnnnnnnnnnnnnnnnnnnnnnnnnnnnnnnnnnnnnnnnnnnnnnnnnnnnnnnnnnnnnnnnnnnnnnnnnnnnnnnnnnnnnnnnnnnnnnnnnnnnnnnnnnnnnnnnnnnnnnnnnnnnnnnnnnnnnnnnnnnnnnnnnnnnnnnnnnnnnnnnnnnnnnnnnnnnnnnnnnnnnnnnnnnnnnnnnnnnnnnnnnnnnnnnnnnnnnnnnnnnnnnnnnnnnnnnnnnnnnnnnnnnnnnnnnnnnnnnnnnnnnnnnnnnnnnnnnnnnnnnnnnnnnnnnnnnnnnnnnnnnnnnnnnnnnnnnnnnnnnnnnnnnnnnnnnnnnnnnnnnnnnnnnnnnnnnnnnnnnnnnnnnnnnnnnnnnnnnnnnnnnnnnnnnnnnnnnnnnnnnnnnnnnnnnnnnnnnnnnnnnnnnnnnnnnnnnnnnnnnnnnnnnnnnnnnnnnnnnnnnnnnnnnnnnnnnnnnnnnnnnnnnnnnnnnnnnnnnnnnnnnnnnnnnnnnnnnnnnnnnnnnnnnnnnnnnnnnnnnnnnnnnnnnnnnnnnnnnnnnnnnnnnnnnnnnnnnnnnnnnnnnnnnnnnnnnnnnnnnnnnnnnnnnnnnnnnnnnnnnnnnnnnnnnnnnnnnnnnnnnnnnnnnnnnnnnnnnnnnnnnnnnnnnnnnnnnnnnnnnnnnnnnnnnnnnnnnnnnnnnnnnnnnnnnnnnnnnnnnnnnnnnnnnnnnnnnnnnnnnnnnnnnnnnnnnnnnnnnnnnnnnnnnnnnnnnnnnnnnnnnnnnnnnnnnnnnnnnnnnnnnnnnnnnnnnnnnnnnnnnnnnnnnnnnnnnnnnnnnnnnnnnnnnnnnnnnnnnnnnnnnnnnnnnnnnnnnnnnnnnnnnnnnnnnnnnnnnnnnnnnnnnnnnnnnnnnnnnnnnnnnnnnnnnnnnnnnnnnnnnnnnnnnnnnnnnnnnnnnnnnnnnnnnnnnnnnnnnnnnnnnnnnnnnnnnnnnnnnnnnnnnnnnnnnnnnnnnnnnnnnnnnnnnnnnnnnnnnnnnnnnnnnnnnnnnnnnnnnnnnnnnnnnnnnnnnnnnnnnnttgataacccccgagccgatgaaaccagggcagagcaggagtagaagcagcagtagaaggtttctgttaggcagccttcacttcgatagctttgacacttgagcttcatgtgcttgggtacctgtggagacagacaactttggaccgatagtcgagctcaatttaggatagaagcagaccgagtggtttgacccagacgaagttaaatctatgacataggcttttcccacaaaactttgtatacgagtagttttaacagtttagggaagccatcctatataccaattccattcagagcgaaagagtacaatttgatctagatactaagtacagaaggggaaagagaaggagagggacgctaattagctggtacagggctttttgtgggtttaggtataaatcctgcaaacaggggataactcagccacgaagctcagggaatcctccaacttcaagtctatacagtgacaggtagcagaacacctagatcgtcacatatccatccagccacgagactccaatagaagccaatgctaaaggaagtagaagacatgggcttcaaacagtttctgtataacctgcaggatctggtattaaacgtgaaacagaaagtagggaaaatcataccgaaatcctggtaagtagacgacggaaaatcgtggtcatgcgagtatattagtcaatttatatagcagaaagatttccaaaataacaatagctcaaaaataacaatttaatgggataccattcataagcgaatgcacagataaaagtcatataggtctgtaaaagagcctatacagaaacggtatcaatcttggtttctaggcgctagggttgtcaatttttaggtaacaaatcctcatatagcaaatctttctttttaggccagggaggtaataggagctaaggaatttagacttccggcaatctatgatcaaatctgtgaaacgatacagcctgcgagctggcaaaactccctaactacaattcatcgcatatatataagtaactcgttaactaagagtgaggtgaccgtttgagtgggtgacatagattcctcatctttccaagtaggtgataacatcatattactacgggctaatcaactttacggtagctctcttatatcacaaaccccaccttaattgtttcgttagattacatggaagcatcaggcatataacaacgaccctttttccttcatagtaccttaatatttcgtgaacaaacagtataatcgcgctagcgatcttgattctaagcagcctactacttgcgattccagtggtataacccttttaccgtccgtattctaaacatactaagtatataccaggcttccagacccttaaaggcaatcatattcccaccagagctggtagtaagcaatgcgatttatatagctcgatatcgccgggacttgcgctaataatcttttgcaatttacaatatagacacctatcccactacccgcacacggcataaggcgagactacaatctgtctagtaagccaacaagtaagaaatgtaatacctctagaaatagtctatatcctgataccatgttctagtttctatcgatccaaacgcgaaacacggtcggctccaccaacatctccgggcacacgttacacgtaggtagcattagaaaacagtcacagggcgatggttattccgtttcatcgttactgctaggtcatttcccctattcaactgaagatagacattaagtttctatcttcgataactctattaggcctagcgttactaaaaatagaatttgaaaaacaatcaaaggagcaaaatggtgatactgagactattatatacaacagattctattgcctagctactattctgagctctatattcttgaggtacaccagggatctactgtgccctaaagtgaactaatcgaggacagagaatttatattgctacgagaccatacaacgattattctccaagtgatgcgccagagcttcccatttctggttctaacgagttggaggaca

SEQ ID NO: 115 - DNA, 89350 bp, Penicillium roqueforti
  misc_feature (21055)..(26782): n is a, c, g, or t
  misc_feature (30124)..(31815): n is a, c, g, or t
  misc_feature (36457)..(42376): n is a, c, g, or t
  misc_feature (65640)..(66338): n is a, c, g, or t
  misc_feature (74715)..(74862): n is a, c, g, or t
tagcacgaggtggtgggtaagtagggtcggaagaaggggtaggggttatgttggtcgatatgttcaagtggcctcgagtcggcccgtcgcaatggcgaaacgtatggaggcctgtactgcctctaggtttagcgtccacttctgatcatcagaaggctgttttccgcccaggaagaaagatatgtttcctcggtgagtctgcgtgcattgtaacatttccgtccggtacgtcatccacttccgacatcggaaaaggaagtactctacagtctctcttgcttgtccgcaatcgcattgatccgtctctactatattaatttgattgagatacccattgagcctagccatgccggttcggagctgggccagtacgctcgcttctttccacgttaggcaatcatacaactaccgggtgtatttgcctagcagtgcggcatctactcgttttacgtgtcttcctatgttctctggtagctcactgctagggactgcttaggaccatgcgatattcaatgttatcgacttcatcctcgagacgtattcttataggagagcatcttcttatattgcagttctggcctattctttagctagacctaacagcttgttatcttcggtagtagggatctagtggaactcgatacagtttccgttcttccgcaaccttctcatcaacttgtacatctaacaaacaaactcctggccagactattatcgggggtttcttagcgtgagcaccgccgccttattgcttataagcaacgtagtcctgtagtccttaattcctactatcattttcaacatatataccatagctgccagctccgcagagaacgggttctactctaccctcgcgcccaatatgatagaaaacgttttgagcttcaattttcgatttcaaggtagctatttctcgattgcgactctaaatcccaccagctcgttccgtgccgagctactaaccgcaatctatatcaacccgcccactttagtctggggttcatattgtccatcagtattggtctatacgcgttcgtcccatagggccaacgtgaataggtcaattgtttccagtatctctatatcgatatacctaagcgcatctgccacttagtacagtagcgagcgataatatcgtctgaactttctaatccagtctatacctctacagagtgggtttatttcaggaaaggtatatatatccgtccacattttcacagcccgtctccagaatcggttccgcgcggtggcaatataggcctccgcctccgctacgctagttacaacggtaaggaatgtccctacaatagcttatgctctaactctttagactcaattaatcggccccatagccttatccttacacacgtacatccagacattagaggcgtagtctataactagcgccactgtcgatataaataactgccgcgctgttactagggaaaggccataaagtcgccgaagctctatcgctacctctaggcccttagatacagccctcgccatatattccttatatttcagtctcgtatccatcaagacacccaggatcttaacgtgctctttagacacaaccgtctgttccttaatgataaacgacttatagtccaatttatatatcttaggagcaaagtgtataatagctatcttttccgctttaaaagttgctctacttctcctttcccaatcgagcgcctcattgataattgcctcaattccttaccggttactctacgcggttggcccagtcacccatacagtaaaatcatccacaaaagcgaccgctcctccttagctatcaatctatctttatacaaggtctatattaaagaaaaggaataggatcggagataggggtaagccctaaggcaggccagcttaggataatctttaggccttagaaagctgcccgttaatctagatagtagccgttcgctctaagtagaataccttaacctaccggagcaagtcatctaatatacctcgcgcttttatcctctagagcagttgttctttacacactctgttataggcacctttcacattgaagctaattaagcttaatacttgtcggccacaccatgctacatagatctactcttaaagaagcacaagcgcttgctctatagatcgctacttttaggtaccgaagtagctggtcgggagcaatccgtacgtttccactatatataagattctttcagtaaccactaattcgagtatctttcctagtatcgctaggagtaagatcggcctccacgcctttacaatagtataattttctttattcggcttcttaagcggtatgatcttcgtatatctctattatatcggtaacgcgccttctctcagtaatacctagaatagatcgagaaccctatgctagacagtcggccacgttatcttctagactattaccggtagaccatcttcgccgggtgccttctatgattttgtagcaaaaagctgtctttcgatctcttctataccaactgtaggtatcctcactggttctctctatagtctcgtcccctcatcttcaatcccctctagcagaggggggaagaacttagacaatagctcttctgcttactccttatagtcagcagtagtagtcctatctactctgacgagctacggtagtttcccaaacgccacattgtccccagacttcaggtacttagcggctttctagatattatcgttatctgcaagaaactcattctaatacttcttcttttacttacagatagcattataatattattttactacatcctaggccatcttttcaagctaaggtactttacaccctatccgtcattctaagcgagcgcgattgcgccagtatatatatatataacagagttatattaggtcggttatctaccaccgcttcgcgtatagcgatagtctcgctcttagagttaacgtatacactatatctaagactgcagacatcagttggtcggttttctgctatactatgccttccgatagagtaatggctagagtcctcgcaattctagcattaatctctttctatagcgcattctttagaagaagtcgttcctgatatttcagggctagctatagtatatcaaataccgtcttaatcatccggtaatctaagccgtactcagtcccatatattacgcatttagtcatcaggtctaccaaattatcggaggctaggataaggtcaattgtggactcgcagtccctatactatccttcgccataccatattttcgtgccttatttaagtaagctacttagagcaaattcactcataaggtcaatgattagatccgcttcaccttatcttcctaaggacacctcgtctccgccccagagttaatcatagcggttgaaatctcctataatcatgatattcactactgcacctatatctcgccgtaccatcgcaattacccttctcaggtgaccatacgcgtcatacagagccaaggaatctcccccttcgacgtagaccaatactataaagatcagccgttcgggtagtcggataaccgctaccgtcagatctagggacttaatagccacttactctacttctatatctttattaacctaaagcatactctagatcgcctatctgccttccctctaggaggagggtactatcttcatctatttataatatcccattagggtagtcaagagttgtccctaaatcctccttacctagggttcctaaattactaacgccactacatccttagtttattcgtcgtttattaagctttcatacacagcaccctacttcctcacattcaattagattattcgaagtattttattcataatatagtaggtagagcttccggcaattcttactaaacgacttatatggcccactgtatagaacacactttagaacctcttgatcgcagcgactgtagtaatgaccctctgaggcgcactttacatacttctaggtcttccggtattagaatgccttataaccaatctcctaatagttataacattatatcggtcgtagctgatatttaaagacactagttatcctagactcccctctaacgtagaagtatccgttggctaagagcctctatatatcggagcctttagtgaggtacacgaccatcgagctatatggcttcgcggcttccttactactaagccacatcatcttagcgactatactttcgttttctttactcagtactacagctactccagccagaatggcatagttattatctagcaccgcagccctcttaataccgttgaccttaatcaggtagagctcgtcccagagcacctaggatcttattccgatcttttcttctaccactttcttaaccagctagtactcggctttatcacaacacgcaatcctgatccgattggggtctcttagactcacggtaaccgcgcggcagcgccagtaggtataatcatccatcgttcggatctctttctcgattacagccctgattaagcccacggatatcttttcattttcattttcggtcatcttcgaggtaactatcgtacagtacaaagtttcggtaaaggtggtcggtattgtgcccagcgttaacagtatccatatattgcttaggtaactagttagaggagtgcgcgcgacatctatataggatagggaactcgtaggagcgggaacgctgatttcttcgcgcaaggattgaatctcgcggagaatcgcatcatagttgttctaagagcatgcctcagagtggcattacggtattaagggtctatcagtcaggttctatagcttatatcggacctcagcgagagtaacactaatctctacttgggcttttagtagttcttccttatgtatctcatcgcggagtctgatctccctcctaagtttggcgatctcttgcaccagattgctgacatcgaggtcgccgttggaggagtgcgcgcgatatctgtataggatggggaacttgtgggagcggggacgctgatttcttcgcgtaaggattgaatctcgcggagaattgtattatggttgttctgagagtatacctcggagtggcattgcagtgtcaagggtctatcagtcaggttctgtagcttgtgtcggacctcggcgagagcggcaccaaactctgcttaggcttttagtagttcttccttatgtatctcatcgcggagtctgatatccctcctaagtttggcgatctcttataccagattgctgacatcgaggtcgtcgctctcggtcgcggagttgtccgaagttgccacgttaggctggtctttgggttcgattctcttctttggtagcggtcgcgtcttcctctgctcgttatcgatctcttgctctcgagcatagtttttcggtggtttggtggtgcgtttcggtctcgacagtcgcggtggcgaatcctcgcgtttatcgcggtcgggcggatcaggggttcgcatcgcggcccgtcccgtcattactcacttgatacgggaggtcggtattttcgccacgtggcacaaaaaggctatcactgggcagttctctaaaatttagtacagtcactgtcgagtacagacgccggatgcgttctcgtcgctgtacagtctgtctccgtgaccctatacagtctctctttgatcctatgggactacagtagatttcgaaaacggcttccccgtagaacactcccggcttgtttctcggcccgtacccgaaaccacactagcccaatttcggactagtggtaagctaacatatattgtgagccaagcatggtcaataccaaatccaaattcgaaatagggtggtttcgggtacgggccgagaaacaagccgtgagtgttctacggggaagccgttttcgaaatctactgtactagggtaatgggaccggaattcttttagtcccataggagtagataggaccaggatatgggaccaaaattttcttagtcccatgggagttggcaaggtctagctaagacctatattttatgcaagaatgggttcaaatgggttgttattgggttattaggtttaacctattgggttttgggttctgccgaagtctataccgatctagttgaaaaacttctaccccctaccacagattaaataaaatagataaaaataagtgggtctcacattcgagttaatacatagtatgggtaggtgcaaaagataaaataatcataagtttcatcatatagaggttccagtatgtgcctgtattcggctaatagataaatacatttgtagagatctacatatcactgaaccatctcatacattgttgtacccagtatttctgtcagtataggtaagcaagccaaatccgacggtccactcaacctactccaaatccgcacaggatttgggatactgtagggcatgcttaatccggctgatgagcttctcaccatccacctcgaagacatagttcacctcccggataccctggggcgcaagtgccttctggtacacatggatgtttccatagctgggactgccatacgatgtgtccacatccagatatacttgaaaacgttagtcataatccatggcatctttaatctaccttccatatgacatacctgaagtctggttgacagagatagaagggtcgaccatcagcgcagcagctgtttcatcccagaaaggcaatgacaggtcgtaatacttatagaagagctcgctgtatgggtttggaaccgagtgaacctcttccaagaactccttggtcgggaagacttggttggcaacattcccggcgatggtgatattggggaaatccgccgtcagggctatcttagaagcttccgggtcgatcatgagattgatctatattttcaggagtcaacaccatcataggatcattcgaagaatactaacgtcagactggtgatctgcaagcatgatacttccagtggcctgaagcatgttcaggtcgacataccctcccataatcacaagatccttggcaagtgacgcaaactgcgggtccatacgcacagcaagcgcaatattggtcaaggcgccggccgagtatatggatacctggccgggatacttgtgcaccatctcgaccatgaagttagccgccgaggtggagctttccggtcggcccttcgggaagccttccttgaaagcttccttgacgatgcggttcggatcgccagaggtaggatcattgccctcagcctccagagtcttattctcgggcgcaaaagcaccttcccagggcagtttgccatggatcatctcccatgctcggaagcggtggggggtattgatcagcggccatgtcgcacctggatagactggaatacagctgagattcccggcctctagggttgccactgcgtgcaatgcgccctgtggctgccagctgttggcggtatcttaaagttacacttagtgaacaattgcgccaatgcagtaaaatttagatacccacctgaggccaagcctaggatttccacatcgccatcaagagcaaccaaataaggtacaaagcccactgtataccaatcattgtccataatggcatagtgcctatccgtccgccccagcgcaagcgagcccgtgacgaaagtaagcattgagctgcagagcagcggaaccgaggtcgaccaatgcattgcagggatgaagcgtagtcttgctgaattgaaagaagggaatatacaattccgtatgaagcgcagaatcgatttcaagtaaataaaccccttcacccccggaagcctttatacctttagattccatcttaaccccagagttccccagagtttcttatccaattgtagtcatcaatcagcatggacacaccaacttagagaagcagtggctacggtttcccagaatggacgttgtgtctggaccaccccacaatttcactgcagatttaatgtcggtttagggccgagtgggaccagttaagccctcacagttgggctaaaccattcagggccccaaccctctccgaatttaccctacacattcccatgaataggtcgatagccggattattttaaatggaaacatattggttcgctattactccattctccgcctcgggtaacacatcgaggtagcccgatatcgtcatgcttcgctatttattccgactagcttaatactgatcactgacgattgatctggggtttccaaaatacgaacgactgttcttataccgagtatctggcgtcctacgaccaccgacaaacggaatcagagggtcggagaaatcgacactcgggactgcagatgacggtatactctagaatttaataggacgagggacctctgatgggtcatcatggccctctgatgaagactgtcgtccgtccagagagaaataggcatttcttcgagacgcgtctagctcccggcccttttttatttggaagttgcggctcaagtcatccacaaattatgcactattcgagatcgatttactgtgatggtgctataaccctcccaacggccttaatcccgagcgaggtggcacgaattgtcctgcactcatcacctacatcaacaagtcagtcaataccaagaaatcaagatcagtcataggtgacacgtatttctccgtttctgacatgtcgagcatctgttcttaacccattttcttggctgctagcgtgggtctccagggcatgctattcagatgggcactgtataaccttagacgaacgggatatggagagaaagaaatgatcgttggctccgatgtgcggtcaactgccgaagcgggcgctgattcgggtccatcgtggagctaacccaaatcgggagagtcgagccgaaacgcgaggggaaaaccgtggaggaacccgagcgctaaaccttttcgagcggttcatagcctacaatccccagaacggtcaatgtttgaatctacaagctagtagatgagatcatgaaacatgaaacacaatatgatgatattgtggaagctgtagagctataaaagaggaaggaaaggtagatcttgagagtgtactactatgggcacagtcgtgttgtggtccctagcgggctccagggccaaatacatatgacctttgcgccaacgcccctctgcggagcgtaaacagcagacttgcaggttgtaccaccgccaatgaccaatgtagggtgagttgtcagatgaattttgattttgggatctgcatggagtgctcgctctattgtgctccagtgtgtatttgttccaatatacagctgcttctcctcgcctctgactagattcggttgaacgtagtttgtgatcgttgaagtatctgttctcggtgtttttattggttggctgatggcagaggggtgtctactacgtccgatgtgaaagtataaatcattgcagcagcttatagatatctttaacgtatttcacatgcgagctggacacccccagaacatgcaaatttagataagccgagatctaccgatcgtaagtagggagtgagtgggcactcaccttggtgctaaatgacagtatcgcgtagtccgagatccagaagacgagccaagattgcaaaatcattcacaacaaacttcagatcgtaaaacggtctaattggctgtaatggggttatttttccagtgggctgttggcacttttgtctctattggataatagtgatagtgatcaacgcgatagtcgggagagttagtcaagcctcacggcgttgaggtttagaccctaagtattcaggtccatggcctgaacctctacaaacatggtatctaggcttagtgctcacagatcggtcggcgaggtatagatgttcagactcaggaataccaaggtcatgtaaataactaacttcaaggaatctagtctccgtcgctcatcattacctggcggttgtctgttttggttatttttctgctaaccggattgggagcacccaacagattgccctcggtctagttaccctccgatatacaatcgcaattactgaattccattcacccagctgattgcattacatcaaacctatatccgcataagcaactagcatgagccgatgctggctcgttacctttcttgcgtagcggcccactcaaagctggcagggggtagtcggtgtggtgaagtggcgctccagaggccagcttataagcgaaccctgagccttatcacattgtacagaactcctttcaactcgaagatctgggctatggcgctaaccgggttgggcacgccaacctgggtgctcttgatctggttagtctctaaaatttaacctcatatactatatagcctgcgcattggctgggtgcataagtctttaagttgccgatatcttgtgatataaatcataagcccctaagtagaaagaatccctatgaatacgattcttttaatacgggcctgcaattgaatatgaaaaagctcctcttagcagcaatcatgtatcttaagctcttgaaacgggaggtaagatttttatttcgctctaaggaagttgttaacttgaccagccctgagacaccttccacatccagcactaggatgacgcggatcacccgcgacaatattagtccagatccagttagttattctgtaaattttactaatctatttccgatacatacccacaaagcactgttgcaattggcttggttccgggcactccgcgccaacatccgggaataggtaagagaagtcaccgttcgtatagatcatatagatctatgtcgagtcctgcgacccccttcccccctggagagtgggacatgacaaagatgcccttttaccgccttcgtttacacctaaaaagagtatccaaaagaccaccaaaaagacatcgtagaagatgatacaattgtcatacgaggaaagatctaatacctaggcacgaaattctagtgggaaaccataaaatttgctaggacttgcaagcccactgacctggggctcgctctcagggacctcatcatatttcgcactgtggtgtcccgaactgtggtgttccgtgccatggtgtccccagccgtggccatgtttccgcccatgacccctggcgattccggtaggagtgccgctcgggattgcactgacaacactgcttggaattgcgctctgggcatcagtggggacttcgctcaccgcgggaaccccactgggcccactgggggtgtcgggagtataaatagcagtggcagccggaagttcactgtctggtccacttgcaatcacatccacaatgccactggccgcggagctggtaacggcctttgcgacttcgatcacagaactgctcgatggattcccaaatccgcttccgatggcggcgacactcccacttgtagccttggctgcgggctcggtagtctggcttatggctttgattgtggttgcacttgaagcggcttcggtaatctgggttggggctttgacggtggtctcgctcgaagcggccttgatgacggcactcgcaccctcagtaatggcgacctttgcggtcgcgctggtggtgacactagcagccgtagttgtcggggaatccgttgcaccatcgcggcctacgcaagcaatgctcatctttttgccagtcgcagaggacgaggagtcatcaatggactgcgagaggtcccaagtcatgttgacatagggccagcaaattctaccatctgacatagtcaccatgtcaccagcaacgtaaacatcgtcagcactgaaagcttgaccaaccttggagccggtggagtcaacttgctggaagtaagttccagcaaaggtaccacggcaccccatggcaatgaagtcacaagtcaggttcgagatttcctcccaggtgacgagagcattgctacttccaaaggcggcagcgtgagcgtttgagcaatcgttcgatccagagttcacccagttgacctggctatctccatcctcggagccgacctcagacgtggcctgggcgccaaccttggtatacttatcagagaaaagcgaaatagcaacattgcgaccgttcgtgcggttctgcacattcgtgtagccacttcccatccaggcgttctctgtcacatcaatcgcgccgcgggaaacccaggcgaagatatacttggtagtatcggcaaaccgagccaacgcactgtagctaccagacataccacccataggctcaccagacgcgccgtttgtagtgttctcgttggaaattttgactccatcggtggacattccttgcgtcttggtgttcaaccagatcgcgtagacaattttccaagcaaattcaacagagatgatttttgattggtaatttcgcagtcatcaggtcgacctttttttccatttacttatacattactcacggctttgtctctaacccgtaaaattgagccggtccagcgaaatgtttaccggtgcctgcgcgcgcccgcagtttcttgccggccctcagttagatgagcacggccaggtgtaaccggcagttcaaacagctttgccctcagtaatacatccttcacttgagtctagtacagagttagaacagttcaatgcgggtttgtttattgtgattctagtcgcatggttgaagacagctttttttgcgatggccaatggctctccctaaaaaaaaaccaatttagcgtgatgcggtagattggcatataatatataaaaaaactatttcctcgacttacaatggcgatattcaactctctatctttctacctgaatatagaggaacactgaatccttcgagcccaatggacgctcctgcttcccactctccttcgggccggactaataaaagaaagcgaggagcaccagatccatataagaagccagtagggataccaggcagcaccaagcaagtgacaaaggtcagatttcactgagtccgtatttgatcggctctaaccaaaaaaacagacaatctcgataggtgcggtatattccctaaccagtgatttgaccaaaatcctacaaaaaaaacccgctttagtatcttccgctattaacctcctagacctctatttatacctgtaggagtattacatgatcaagtccgccggcaaaatacgcttagaagaggaacatcgcttcctacaaggctctaacaaatggctggtaggagagaatgagaagctccaagaatgctataataaccaggagctgctactgtaggatcgtcgtcaggcctttgactctatatatcagggtattctcagaacattgcagaatagtaatagacgctattatcatataaatgagttacagtaagtttttgcttaagcgaaataagatcggcacgcttaacctggctatgactagtattatactggtaggcaacagagtgataaataggtctcgtggttcttacgttaaacagaaaaggcaggtaataaactggtcggaaaggatagttcaacggggtagagtataggtggggcgttctataggtggtatcatactaccaatgaatgtacttttaacacaaaaacacaaatcgagtaccgtctgtatctatatgaatcaagaacaaccaattactaacacacagggacttttgttaaatatagctaaatatctggttttgtttggtttttttcctgtatttacaaataaacgccttactaccccctaagtactaaagctctgcgctaaaccttagacttacttacctgtcattctggcctataaatataaatctctaataaaaccacagagattttctcactctctaaacctaccttttcttcgcaaaccactttttattgtacaatctcacatactacgcagaaagaatagggcaacttaatcaacttggttagttgaaacatcttcgatagctagtattagcgctgataaaaccctttagacttcgatttagatctagaccttaagtcaatctagagagaatcgccgaatataccgataccaccaccttatctcgcagccaatcgcagcactctcagttcaatccaacctattagcatatcataatatacaaaaaataaggccgagaggcctcatgctatcgagtacattttctaccctaactataatagcgagtgcgcctttagctagacggggccggatctgttatccctagacacctatgccgatgatattttcctctacgtatcagcattctttctttttgaacgggtacactagatagaaatccggcttagtaagcttagcacaggaaacaaagaggttgtagaagagtatccgttctttcttctgtaggttaaatcgatattagggaacctacacagagtatgtggttagatacataatatcatctcgcggaatggctatataggaagtactggggaaacccaatttcaattatctttacgaccgtagatagagactgtagcagatcctggcatatagagcgcgattcctctatcttacatccatccctctctacctatagcatcgtttgatccacaattctttatacagaatattgttaggaactagggaatataagtgctctggctcttagatagcctaatatcataatggggtctattttgacccttctatggctttattaaactaagataaaggggccatttagatttgcagatttttagataataatcttaatagaataaaatatagataaccattgcgtttactaaatgatatatactatcttttgtggttatcttttcatttataagaagccctaggtttcctataaccggtgatatataaataggggcgtattatgatatatagtgttagagactgcgggaaatcagcgcgttagagatattctgtaccagaaataagtcggtgaccagtgctatagcgatcatcggtgcgagtctatttatagattgtatggttaataaagaagcagagttcgaatggacccatcagaaggacaggaactcacagcagttgaacgggtttattctataagctacgtaatacagaaacattgagtgaaatatctttttttttttactgttatttttctgctattacgtcgggcatgtacagaagatgattataacctataagcctggttacacgtttattgtatctggaagatctattataaaatagttatagatatttaagtaaccaaaccaccggtatagtggtcatttggatatattttagtactcctgtaacgctacctaagctagtttataagtaaataagaactcagttactctctatactactttagaccttatcctcataataacacagtttatatgggccatttgacttctagggtactcctctatggtaaattccttattatagttataaggaacgtttatctattttctagaaacgtatataaggagtaagcaggaatataagtaatacactttttaaccaaatacatatatcaagatcctaatctcacagtgcattccctcctcttagtattttccttattcttttcactataagctttcgatcatatactaacccacacatctattctaaacttcatattactaggacctattgtggccctatttagccacattccctttatcatagcttccttactcctaaataaatatactactacagctagctttaataataaccatagaaataggcttattttctgctacttcatggcatggcactccagtatcccctattgaatcgtgaatccaatactaactctcattaggttggtatcgttagtaaccgccagagtgctagcaactataacgacgatataaagtgtgcccaatatataggcatcgacgctttcgccttgaacatcagcactgattcttatatagacgagcaactagggtttacatatcaatctgccgccaataatggcataaaagtattcatctcttttaacttcaactagtagtagactagttagggtaatacagtcggcacaaagatcgcatagtatactaatctacctacccagctcaaggttaataggaaagtatttgtgtcttcgttcgccagtaatagtatcgatatcgtagcgatcagagtagctaccgacagcgatatatattttatacctaatttccaccccagtcggggtgattttagcaaccttcaggctactctaaactggattgcgtagggaaataatggaaacaataggtcttcaactcctagtaagcagctcgctattaccgatagtaataatacttacaatatagctcttaacgggaaaccctatatcgcgtataagtggctcgaataaggtattttttcttcttatgctaattcaaaattagcggtctcgccttagttcttaacacatttcggcggcgaagtctcttacacgaaaaactgggtatttccctctagactcctgtggtataaccgatagagagaaattctagctactagtccttacttcgtagagcttctcacctagaataactacagcaaatcgtactacattagtccgctattatcgccgtatatagataacggggcctctaaataggttataggaatataagcagaactctcctaagaagtataaggggcgacggcgaataatataaaaacaggccatataatggctggcttaatatggcgaagccttttatagctgcctataaagctggcttaaaactaccaatctgtttccttaatgaagaaaagctagtctactagtaccgaacgacccctaagaatatcaattatgatataaccgatacgataatataagggtgctctaacagctagagtggcaactttatctgtggacgacctaatggcgtggataatatggccgacgaggtatttatcgtaacgatactaaagtctcctgctaccgtatatgtgcagtctagctgcgaggctaagacttataacgctaaggccggaatatggtcacactctgtgccgataggtataggtagacagagctttaaggttgtttgtgaaggaaagacagttaactctctgtataggattagtcggagagatattactaacacatatccctatagtatctacaatttcaatgcttatataggcactctaccagcggaagcctctattaaccggctgtagccggctagattagcactattatcgcagggattgcagattgcatatccgactacactaggtaccaggtaaaagaagtaatttaagtattactgtactcttgccagattctagaggatattaattccttaaacagtcagttaaaagacttcgtggctcaaatatctgacaatctgctttatctttaataatacaaaacactatttccctccgataactgcttgcctatcaattacattgccacagaattacggatctcggcagaaaagttattaaatcaagaaaacccactgtatatatagacggttcgtaattaaaattaaatcaataatattcctatactattctatatatcgcctagtttcccttagcgttaactttaaacaaatatagacatcggactaattgagccgctaactgtaaccaattagtaactatcgcaggtgattctataggtatcaacatagtaaatgtcgtcctggaagatatataagatccagtaccatacgtggtatatattacagtgttccctaatttaatatggcccactcgattatagatatacactaggccttagcgataggaccagagaagagttattatagtaagaccgattgcaagaatgtctacctaggcttcgatgtccctaaacgcgttaataattgaatgaccagtcggtctatatagggatcattaactcccttaaagatatataccatctccgcttcttcagatattagaatctgagggtcaatagtaaaggtttttttcttaatacctgattacaaaattgctttaagtcaattttgcaaaaagtacagtgtaatcccggttcctacctaaggaatactaaacaacctactatagagaacagagttgtttatatttatatttacatcatggtcaaacgttcaagtctattccttaaccatatatattcggtaccgcaaggtcatttcagtaagcaattttctctatacttcacagtaacagacttatcgataatctggtatttaaatcattgaaaaggccaaatcaaaaatgccttaataggataatataacgttatatatctcttatgcctacagcctacttaactattttcagtacccacgcgtataactataagctggttccttagtactaagttataggtgtatgctaagtatatcagagtttgataatccatatacattttcggataatactaatatactaagcaatagggctaagagatcttttcgtctattaaagtcgcctctaagtaggaaccgtctactaactcacatagtacgcaatatactaataagaagaaacgcggacaacaatctaccagaaatcaggccgcagattagctttctttattactagctttaccatggtcgccgatcatcattatatcataaaaataactcagaagatccagaagcattccctctagaagggatctacttgtaaaggcgaactaaatatatagtaaacaaggccaggctctaagcttcctatagaatactccctatgatacataaactaccggtagataagatagccaactatatagtaagtttactaataagctccacgaggtcaaccagtcaaccaaccattaagctaacaccgtgctagccataatattactctaattaaaggtaggcggagcaggtccgaatataaatacgcgtaagcgaagcgcactaagggcattaggattagggtggattattttatatactaaataaagctactagaagttaataattcggtcattataataataaggtttctatatacctaggctaatatatttataacctacttcatatggttgcctatctaaacacttccggtttacatatttacttcctcagataataacgattgtggcccctttctgtctgcgcgaaactgtcgtacttattcaatttaattatcctctcctataactgttagtagtagatattagtaatccccaattgtagactagatactatcgggcaaatcttcgtcttcaccccgtgtataaaatatatcaagatcgaaaatcatcagtcagagatttcttcctatatagggttaaacagtcttcgtaacagccttatatatcgacagactcgtacacactatacagcagcttatcagtaccataacagccttccgcttctaacctataataggaaatgagattagaatcggtaacactcacccgccacagccacagctccgcattagttatttataagtcgcgcaacttcctcttcaatattaaccgagccataaaagtaccagagccactcaccctattagtaggaaatattttcttcggggcctgattaggtatgtaggcagtagatactgaattataaaatctagagcttagttagattatatcgcctaggataaattgtgcttacagataacttatacaaaaccctttctaatcgagatagaatagctgttctatctatttatttacctactttagataccctacgtatactatattagtaaaggcgatccctaggctccgaaccataggctaaacgtagggacataccatctatgccaactcggcgcttctagagaacctctaacttctgtaccattacttctcacttataactggcttatactagtatctcaatatacgatagcgctcgaaaaaatccaatatcctccaccacaaagaggattatactgaaccgatagaaattaagagggtatccatagggtccgagtataataaccggctacctactcaggaattctagtacgttatagtataactttcgcgtaagcccaagttaaggctcagctactatatataccgttcgttaaatcggtccgtcttcctaaaacgtaatatagaaaataggaagctgaaaataagtacagaagctagcccgtggtatctagagctacacgtactagccagggcggatcggttggttaaggggtagtgtgatattaatctaaaggaactagctcatagagtttatggtcacctcattttgagaagatttccaaggcttctggttctatatagccaccatacagataacggcgctaatagaaaaccataggcaaatagcgcccactaagtaccaccgatacaatgactatcgctctataaggtggtatataagcgcgcagatcgcggttaccataagaagatagtagcattttattataaactacatataatgccgttagactgccgcacaagtcactagtatcataagaataagagcagatcctacctacattgagttagctatagccacctatataactcataaatacagctctacagatagtaatatataccgctattagaataatataccgtggatttataaggttcgtcgttctagtaatactaacgagcagcgaatagtgcaatagagaatagagcatacatatacgacctacctagcgatagaaccatataagcatataacggtccatatgcagcagatctaccagaaaaccaaaagtcatactggtatataagggaatgaggttaataactaccaaagagccagctcttttctatacttccctctaggaataggtttacaactaaaggccaataatatttaccgcaagcatgacagctaacactagtgcttactagtactaggagatatccagccagcttataccctttagtaggtagacgtaggtaaactgccgccaggagcctaacattttcaattagaaggggcgataaaagcctatatagcatctcccccgcgcccagccccacatacctcgtctaagccaatagatcaactatattaataggacggctgtagcgctgatagtatacaagttagggagagaggtgctagtaaaccattgatataagtctaacccaatcgggggcattctatttagttattgacggaaaaacggtggtaaggcgagtgtattttgtggcagaaaaatcttaataaattctctaactctctaaaactgacaatagtcctaaaacatgacaatctgatggacaacttagtaatcaaaacaaacaaaacaannnnnnnnnnnnnnnnnnnnnnnnnnnnnnnnnnnnnnnnnnnnnnnnnnnnnnnnnnnnnnnnnnnnnnnnnnnnnnnnnnnnnnnnnnnnnnnnnnnnnnnnnnnnnnnnnnnnnnnnnnnnnnnnnnnnnnnnnnnnnnnnnnnnnnnnnnnnnnnnnnnnnnnnnnnnnnnnnnnnnnnnnnnnnnnnnnnnnnnnnnnnnnnnnnnnnnnnnnnnnnnnnnnnnnnnnnnnnnnnnnnnnnnnnnnnnnnnnnnnnnnnnnnnnnnnnnnnnnnnnnnnnnnnnnnnnnnnnnnnnnnnnnnnnnnnnnnnnnnnnnnnnnnnnnnnnnnnnnnnnnnnnnnnnnnnnnnnnnnnnnnnnnnnnnnnnnnnnnnnnnnnnnnnnnnnnnnnnnnnnnnnnnnnnnnnnnnnnnnnnnnnnnnnnnnnnnnnnnnnnnnnnnnnnnnnnnnnnnnnnnnnnnnnnnnnnnnnnnnnnnnnnnnnnnnnnnnnnnnnnnnnnnnnnnnnnnnnnnnnnnnnnnnnnnnnnnnnnnnnnnnnnnnnnnnnnnnnnnnnnnnnnnnnnnnnnnnnnnnnnnnnnnnnnnnnnnnnnnnnnnnnnnnnnnnnnnnnnnnnnnnnnnnnnnnnnnnnnnnnnnnnnnnnnnnnnnnnnnnnnnnnnnnnnnnnnnnnnnnnnnnnnnnnnnnnnnnnnnnnnnnnnnnnnnnnnnnnnnnnnnnnnnnnnnnnnnnnnnnnnnnnnnnnnnnnnnnnnnnnnnnnnnnnnnnnnnnnnnnnnnnnnnnnnnnnnnnnnnnnnnnnnnnnnnnnnnnnnnnnnnnnnnnnnnnnnnnnnnnnnnnnnnnnnnnnnnnnnnnnnnnnnnnnnnnnnnnnnnnnnnnnnnnnnnnnnnnnnnnnnnnnnnnnnnnnnnnnnnnnnnnnnnnnnnnnnnnnnnnnnnnnnnnnnnnnnnnnnnnnnnnnnnnnnnnnnnnnnnnnnnnnnnnnnnnnnnnnnnnnnnnnnnnnnnnnnnnnnnnnnnnnnnnnnnnnnnnnnnnnnnnnnnnnnnnnnnnnnnnnnnnnnnnnnnnnnnnnnnnnnnnnnnnnnnnnnnnnnnnnnnnnnnnnnnnnnnnnnnnnnnnnnnnnnnnnnnnnnnnnnnnnnnnnnnnnnnnnnnnnnnnnnnnnnnnnnnnnnnnnnnnnnnnnnnnnnnnnnnnnnnnnnnnnnnnnnnnnnnnnnnnnnnnnnnnnnnnnnnnnnnnnnnnnnnnnnnnnnnnnnnnnnnnnnnnnnnnnnnnnnnnnnnnnnnnnnnnnnnnnnnnnnnnnnnnnnnnnnnnnnnnnnnnnnnnnnnnnnnnnnnnnnnnnnnnnnnnnnnnnnnnnnnnnnnnnnnnnnnnnnnnnnnnnnnnnnnnnnnnnnnnnnnnnnnnnnnnnnnnnnnnnnnnnnnnnnnnnnnnnnnnnnnnnnnnnnnnnnnnnnnnnnnnnnnnnnnnnnnnnnnnnnnnnnnnnnnnnnnnnnnnnnnnnnnnnnnnnnnnnnnnnnnnnnnnnnnnnnnnnnnnnnnnnnnnnnnnnnnnnnnnnnnnnnnnnnnnnnnnnnnnnnnnnnnnnnnnnnnnnnnnnnnnnnnnnnnnnnnnnnnnnnnnnnnnnnnnnnnnnnnnnnnnnnnnnnnnnnnnnnnnnnnnnnnnnnnnnnnnnnnnnnnnnnnnnnnnnnnnnnnnnnnnnnnnnnnnnnnnnnnnnnnnnnnnnnnnnnnnnnnnnnnnnnnnnnnnnnnnnnnnnnnnnnnnnnnnnnnnnnnnnnnnnnnnnnnnnnnnnnnnnnnnnnnnnnnnnnnnnnnnnnnnnnnnnnnnnnnnnnnnnnnnnnnnnnnnnnnnnnnnnnnnnnnnnnnnnnnnnnnnnnnnnnnnnnnnnnnnnnnnnnnnnnnnnnnnnnnnnnnnnnnnnnnnnnnnnnnnnnnnnnnnnnnnnnnnnnnnnnnnnnnnnnnnnnnnnnnnnnnnnnnnnnnnnnnnnnnnnnnnnnnnnnnnnnnnnnnnnnnnnnnnnnnnnnnnnnnnnnnnnnnnnnnnnnnnnnnnnnnnnnnnnnnnnnnnnnnnnnnnnnnnnnnnnnnnnnnnnnnnnnnnnnnnnnnnnnnnnnnnnnnnnnnnnnnnnnnnnnnnnnnnnnnnnnnnnnnnnnnnnnnnnnnnnnnnnnnnnnnnnnnnnnnnnnnnnnnnnnnnnnnnnnnnnnnnnnnnnnnnnnnnnnnnnnnnnnnnnnnnnnnnnnnnnnnnnnnnnnnnnnnnnnnnnnnnnnnnnnnnnnnnnnnnnnnnnnnnnnnnnnnnnnnnnnnnnnnnnnnnnnnnnnnnnnnnnnnnnnnnnnnnnnnnnnnnnnnnnnnnnnnnnnnnnnnnnnnnnnnnnnnnnnnnnnnnnnnnnnnnnnnnnnnnnnnnnnnnnnnnnnnnnnnnnnnnnnnnnnnnnnnnnnnnnnnnnnnnnnnnnnnnnnnnnnnnnnnnnnnnnnnnnnnnnnnnnnnnnnnnnnnnnnnnnnnnnnnnnnnnnnnnnnnnnnnnnnnnnnnnnnnnnnnnnnnnnnnnnnnnnnnnnnnnnnnnnnnnnnnnnnnnnnnnnnnnnnnnnnnnnnnnnnnnnnnnnnnnnnnnnnnnnnnnnnnnnnnnnnnnnnnnnnnnnnnnnnnnnnnnnnnnnnnnnnnnnnnnnnnnnnnnnnnnnnnnnnnnnnnnnnnnnnnnnnnnnnnnnnnnnnnnnnnnnnnnnnnnnnnnnnnnnnnnnnnnnnnnnnnnnnnnnnnnnnnnnnnnnnnnnnnnnnnnnnnnnnnnnnnnnnnnnnnnnnnnnnnnnnnnnnnnnnnnnnnnnnnnnnnnnnnnnnnnnnnnnnnnnnnnnnnnnnnnnnnnnnnnnnnnnnnnnnnnnnnnnnnnnnnnnnnnnnnnnnnnnnnnnnnnnnnnnnnnnnnnnnnnnnnnnnnnnnnnnnnnnnnnnnnnnnnnnnnnnnnnnnnnnnnnnnnnnnnnnnnnnnnnnnnnnnnnnnnnnnnnnnnnnnnnnnnnnnnnnnnnnnnnnnnnnnnnnnnnnnnnnnnnnnnnnnnnnnnnnnnnnnnnnnnnnnnnnnnnnnnnnnnnnnnnnnnnnnnnnnnnnnnnnnnnnnnnnnnnnnnnnnnnnnnnnnnnnnnnnnnnnnnnnnnnnnnnnnnnnnnnnnnnnnnnnnnnnnnnnnnnnnnnnnnnnnnnnnnnnnnnnnnnnnnnnnnnnnnnnnnnnnnnnnnnnnnnnnnnnnnnnnnnnnnnnnnnnnnnnnnnnnnnnnnnnnnnnnnnnnnnnnnnnnnnnnnnnnnnnnnnnnnnnnnnnnnnnnnnnnnnnnnnnnnnnnnnnnnnnnnnnnnnnnnnnnnnnnnnnnnnnnnnnnnnnnnnnnnnnnnnnnnnnnnnnnnnnnnnnnnnnnnnnnnnnnnnnnnnnnnnnnnnnnnnnnnnnnnnnnnnnnnnnnnnnnnnnnnnnnnnnnnnnnnnnnnnnnnnnnnnnnnnnnnnnnnnnnnnnnnnnnnnnnnnnnnnnnnnnnnnnnnnnnnnnnnnnnnnnnnnnnnnnnnnnnnnnnnnnnnnnnnnnnnnnnnnnnnnnnnnnnnnnnnnnnnnnnnnnnnnnnnnnnnnnnnnnnnnnnnnnnnnnnnnnnnnnnnnnnnnnnnnnnnnnnnnnnnnnnnnnnnnnnnnnnnnnnnnnnnnnnnnnnnnnnnnnnnnnnnnnnnnnnnnnnnnnnnnnnnnnnnnnnnnnnnnnnnnnnnnnnnnnnnnnnnnnnnnnnnnnnnnnnnnnnnnnnnnnnnnnnnnnnnnnnnnnnnnnnnnnnnnnnnnnnnnnnnnnnnnnnnnnnnnnnnnnnnnnnnnnnnnnnnnnnnnnnnnnnnnnnnnnnnnnnnnnnnnnnnnnnnnnnnnnnnnnnnnnnnnnnnnnnnnnnnnnnnnnnnnnnnnnnnnnnnnnnnnnnnnnnnnnnnnnnnnnnnnnnnnnnnnnnnnnnnnnnnnnnnnnnnnnnnnnnnnnnnnnnnnnnnnnnnnnnnnnnnnnnnnnnnnnnnnnnnnnnnnnnnnnnnnnnnnnnnnnnnnnnnnnnnnnnnnnnnnnnnnnnnnnnnnnnnnnnnnnnnnnnnnnnnnnnnnnnnnnnnnnnnnnnnnnnnnnnnnnnnnnnnnnnnnnnnnnnnnnnnnnnnnnnnnnnnnnnnnnnnnnnnnnnnnnnnnnnnnnnnnnnnnnnnnnnnnnnnnnnnnnnnnnnnnnnnnnnnnnnnnnnnnnnnnnnnnnnnnnnnnnnnnnnnnnnnnnnnnnnnnnnnnnnnnnnnnnnnnnnnnnnnnnnnnnnnnnnnnnnnnnnnnnnnnnnnnnnnnnnnnnnnnnnnnnnnnnnnnnnnnnnnnnnnnnnnnnnnnnnnnnnnnnnnnnnnnnnnnnnnnnnnnnnnnnnnnnnnnnnnnnnnnnnnnnnnnnnnnnnnnnnnnnnnnnnnnnnnnnnnnnnnnnnnnnnnnnnnnnnnnnnnnnnnnnnnnnnnnnnnnnnnnnnnnnnnnnnnnnnnnnnnnnnnnnnnnnnnnnnnnnnnnnnnnnnnnnnnnnnnnnnnnnnnnnnnnnnnnnnnnnnnnnnnnnnnnnnnnnnnnnnnnnnnnnnnnnnnnnnnnnnnnnnnnnnnnnnnnnnnnnnnnnnnnnnnnnnnnnnnnnnnnnnnnnnnnnnnnnnnnnnnnnnnnnnnnnnnnnnnnnnnnnnnnnnnnnnnnnnnnnnnnnnnnnnnnnnnnnnnnnnnnnnnnnnnnnnnnnnnnnnnnnnnnnnnnnnnnnnnnnnnnnnnnnnnnnnnnnnnnnnnnnnnnnnnnnnnnnnnnnnnnnnnnnnnnnnnnnnnnnnnnnnnnnnnnnnnnnnnnnnnnnnnnnnnnnnnnnnnnnnnnnnnnnnnnnnnnnnnnnnnnnnnnnnnnnnnnnnnnnnnnnnnnnnnnnnnnnnnnnnnnnnnnnnnnnnnnnnnnnnnnnnnnnnnnnnnnnnnnnnnnnnnnnnnnnnnnnnnnnnnnnnnnnnnnnnnnnnnnnnnnnnnnnnnnnnnnnnnnnnnnnnnnnnnnnnnnnnnnnnnnnnnnnnnnnnnnnnnnnnnnnnnnnnnnnnnnnnnnnnnnnnnnnnnnnnnnnnnnnnnnnnnnnnnnnnnnnnnnnnnnnnnnnnnnnnnnnnnnnnnnnnnnnnnnnnnnnnnnnnnnnnnnnnnnnnnnnnnnnnnnnnnnnnnnnnnnnnnnnnnnnnnnnnnnnnnnnnnnnnnnnnnnnnnnnnnnnnnnnnnnnnnnnnnnnnnnnnnnnnnnnnnnnnnnnnnnnnnnnnnnnnnnnnnnnnnnnnnnnnnnnnnnnnnnnnnnnnnnnnnnnnnnnnnnnnnnnnnnnnnnnnnnnnnnnnnnnnnnnnnnnnnnnnnnnnnnnnnnnnnnnnnnnnnnnnnnnnnnnnnnnnnnnnnnnnnnnnnnnnnnnnnnnnnnnnnnnnnnnnnnnnnnnnnnnnnnnnnnnnnnnnnnnnnnnnnnnnnnnnnnnnnnnnnnnnnnnnnnnnnnnnnnnnnnnnnnnnnnnnnnnnnnnnnnnnnnnnnnnnnnnnnnnnnnnnnnnnnnnnnnnnnnnnnnnnnnnnnnnnnnnnnnnnnnnnnnnnnnnnnnnnnnnnnnnnnnnnnnnnnnnnnnnnnnnnnnnnnnnnnnnnnnnnnnnnnnnnnnnnnnnnnnnnnnnnnnnnnnnnnnnnnnnnnnnnnnnagtcacgtgatccaactgtatcagggatgaaaaatgacagtattcatcctagattctgacaggtttaaatgtaaaggagggttagatggatatagataaattcggtcctccttctaatccttaaagtatagtcactgtagtaagacgagtattttaattatattactcggtccttctgtcctctaataaaagccgtttgcttcgaaggataacttacgttatgatctcgctatgaggatagtatataataaagctagtagttagcgaaaactctttctatagagagaataggcttacctatctcattgttagtctgtctgcgtaatacgctactgtatactctaggctttggggggttagatatcatgtagtaattatctaatggaccttatcgataagtaaagacgtacctgctctatcccttactaggaaaaggcttgcttgcttaatgctgatagtccctgattgagctattaggtctcaatatatatcggctattatagggataattggctcttaaatgttatataagatacctagtggaggcgggcgacgtcttactatctagaactgtgaactctaaaccgcgaactctaaaccgcgaactctaaaccgcgaactctaaaccgtaaaactttaaatcgcggatactcctacccttgcttaactctctaggttagctggcgatctaatcctgtagttagcagcgctatggacgtttagctagcgactctcctacaaaccctacttttaggccatttttggaataagttagcggggttgccttctattccggcttaccctaatctctagggtaaagggtaagaccgcggggctactaatgacgtagtgacaccttaacggtctagactctgtatctagccgataattggtttatataaagatgactagacgtgctgttgtgatgtaactaaccgtaataggctgagcttactatactaataccacgccctatcttacccctagacctatccgagttcgatatattgtgagaagggttaccagagccttatctgtgagggaattaagatcctttctatctagtagcaagaatctatcatccttacgactttgtggcttaacgtagggatgtcagtaggtggtatttaatagattacgagtaaagatataaggtggtcttatcctagggtgggctctgtcagaagaaagtaagcctatttagggcgcttctctaaggtggagcgaggagtagctaggaactaatcatacattggctcctctgatccgttattattcccctacttttgtttttaaacggtacttcatgtgttttttcctagcttactgctaatcgctccttgaagtaattgtatctattttatgatgtccctctactatgccgttatttattatagtacaactactagagaattattagttatagtaaccacattgccgctgtgcttataggaattggaggtacactggccttaggaatggtattagttgttatttatgattttcgactgagctggactaatgttaagctgctgtgtgtagagcgggattaatactccttatccttgaacggccgatttacctagagctccttattcctcctaggatactacagtaagtgataggatctactatataaacgcggtaaggtaggactaattgatttatcttctatttatagataactgaaaggagtttgaccaagtaaaatcaaacgtataaatagcgtaggcctggttaaactctaactctctaagctaaaatcagacttgatatttatctgaataaaacggcgtaatcttcgacctatctatctatgttaatctactatctctgtcgttaaattgtgaattccgattattattcgaatattatcgggggagggacgcgctggtagctgattataggtcaggaaatagctgatagtatgttctaagttactacagagactgataatattaggctgagttatggaaatatagaatatcaaagcctttacctatatctcggtgaattagccattttctctatataatattagctagggaatttcgaactttatagaagtatatatattatccttctatagtcttggctaataagtaacgttatacttagattttatgataccgaccattttttactaacttgcttatatcgaaagatagtatcgcaaatatatgactttctgggaataggaaggtgttagtctctaggatttataatggctgcctcgatacagttaagaacataggtagtgaactttcttggtctaagattgagacgcctattcttttcctcattacagatggtcttatagagtatgctgacttggacttttgtgagtcgaatcctcatatagttttctgcgtttgggttgcccttctccttgatacgttggcagattccggcgatcctgtgtctcgcagaagagcctggtgagacgccaaagcccacgaaactccacaatcgttcagtttgccagtgatttacttgactttccaagtgggccaagtcctgggggaaaagacggtcacctagttccatggctcgttaaagtttgtttagactcaaatccggaaacaatagtatcatgttttgagtatggtatataggtatgactccaggggcctggacatattgtaaggcttcaagcgaaagagaaggattagtatattgattttcctcggtcggattgtcaaccatatatggacttaaagattgcttagcagtttaggagataaagatcgctgactctactagtggtagtcctatgccaataccatccacattttcggacatattatatagggtggagccctctaagccagatgccggtagtagtgtataatcgaatgtacgggtattggtatatctaacaactaggagggatcgagatccgccggagtagagaaatcagagcctaaggtattggttcctatatctagactaggaacagactagggggttggatacaagtatatttccagaggctatggttttagcggattaatctccgagttcaaaggtatgggcgagataccaagattgtgggtgaactcactgaatatttttgttatagtataaacagcccttacctaaatggctttcatattcctatgaactaaataccagattaaacctaaggcttttcaagcccctagtatatatctgctactatactaactaaaaagtaaaaaaaagaaaaggtcattgtaagataagggttctatatagagattatagctattacttaggctctatgatgagtaattgcgctaaattagccccccccccccccccccccccccccccccccccccccccccccccctcccgccnnnnnnnnnnnnnnnnnnnnnnnnnnnnnnnnnnnnnnnnnnnnnnnnnnnnnnnnnnnnnnnnnnnnnnnnnnnnnnnnnnnnnnnnnnnnnnnnnnnnnnnnnnnnnnnnnnnnnnnnnnnnnnnnnnnnnnnnnnnnnnnnnnnnnnnnnnnnnnnnnnnnnnnnnnnnnnnnnnnnnnnnnnnnnnnnnnnnnnnnnnnnnnnnnnnnnnnnnnnnnnnnnnnnnnnnnnnnnnnnnnnnnnnnnnnnnnnnnnnnnnnnnnnnnnnnnnnnnnnnnnnnnnnnnnnnnnnnnnnnnnnnnnnnnnnnnnnnnnnnnnnnnnnnnnnnnnnnnnnnnnnnnnnnnnnnnnnnnnnnnnnnnnnnnnnnnnnnnnnnnnnnnnnnnnnnnnnnnnnnnnnnnnnnnnnnnnnnnnnnnnnnnnnnnnnnnnnnnnnnnnnnnnnnnnnnnnnnnnnnnnnnnnnnnnnnnnnnnnnnnnnnnnnnnnnnnnnnnnnnnnnnnnnnnnnnnnnnnnnnnnnnnnnnnnnnnnnnnnnnnnnnnnnnnnnnnnnnnnnnnnnnnnnnnnnnnnnnnnnnnnnnnnnnnnnnnnnnnnnnnnnnnnnnnnnnnnnnnnnnnnnnnnnnnnnnnnnnnnnnnnnnnnnnnnnnnnnnnnnnnnnnnnnnnnnnnnnnnnnnnnnnnnnnnnnnnnnnnnnnnnnnnnnnnnnnnnnnnnnnnnnnnnnnnnnnnnnnnnnnnnnnnnnnnnnnnnnnnnnnnnnnnnnnnnnnnnnnnnnnnnnnnnnnnnnnnnnnnnnnnnnnnnnnnnnnnnnnnnnnnnnnnnnnnnnnnnnnnnnnnnnnnnnnnnnnnnnnnnnnnnnnnnnnnnnnnnnnnnnnnnnnnnnnnnnnnnnnnnnnnnnnnnnnnnnnnnnnnnnnnnnnnnnnnnnnnnnnnnnnnnnnnnnnnnnnnnnnnnnnnnnnnnnnnnnnnnnnnnnnnnnnnnnnnnnnnnnnnnnnnnnnnnnnnnnnnnnnnnnnnnnnnnnnnnnnnnnnnnnnnnnnnnnnnnnnnnnnnnnnnnnnnnnnnnnnnnnnnnnnnnnnnnnnnnnnnnnnnnnnnnnnnnnnnnnnnnnnnnnnnnnnnnnnnnnnnnnnnnnnnnnnnnnnnnnnnnnnnnnnnnnnnnnnnnnnnnnnnnnnnnnnnnnnnnnnnnnnnnnnnnnnnnnnnnnnnnnnnnnnnnnnnnnnnnnnnnnnnnnnnnnnnnnnnnnnnnnnnnnnnnnnnnnnnnnnnnnnnnnnnnnnnnnnnnnnnnnnnnnnnnnnnnnnnnnnnnnnnnnnnnnnnnnnnnnnnnnnnnnnnnnnnnnnnnnnnnnnnnnnnnnnnnnnnnnnnnnnnnnnnnnnnnnnnnnnnnnnnnnnnnnnnnnnnnnnnnnnnnnnnnnnnnnnnnnnnnnnnnnnnnnnnnnnnnnnnnnnnnnnnnnnnnnnnnnnnnnnnnnnnnnnnnnnnnnnnnnnnnnnnnnnnnnnnnnnnnnnnnnnnnnnnnnnnnnnnnnnnnnnnnnnnnnnnnnnnnnnnnnnnnnnnnnnnnnnnnnnnnnnnnnnnnnnnnnnnnnnnnnnnnnnnnnnnnnnnnnnnnnnnnnnnnnnnnnnnnnnnnnnnnnnnnnnnnnnnnnnnnnnnnnnnnnnnnnnnnnnnnnnnnnnnnnnnnnnagtcacgtgatccaactgtatcagggatgaaaaatgacagtattcatcctagattctgacagatataaacgcgttttctttttaatagtatgaatattattctaaaaaggaaatccgccctaaccttagttttaaacggtgtttatagggactgaactgagtattggaccgcggataactgtatatagttaagggattgctaatcctatataagtagtatacctttcttaatcggccttttctggctatgctctatcattagcagcggtataagcagggctataaagagatattgatttcctgacttagatagtagtatctttactaatataactaataatggagggacctagtaaattacctgaaatggaagacagatatagagaggtactaccaagcgtataagtaagtttggccgagaatacctcggtatctggctatgaagtctcgcagctagtaagatggatatatggctatagaggaccctactgaccaatcacacgcagaatcacgataccatgaggaataatctatctgtggagcccttctaacctatacttaagatattgaaacagcttaaagaagaagatactgagcttatattttaggctatacgcctggtagggtactaccggtatttgtgggagtcttgtgtttctaaatatatagatggcaagtagcttgaagaagcaaatgaaaagctgcgggccggaaatattcagctatataacgaaggaagccacttgaagcttcgctaagataagtaggtagcttacttgtattctattgaaaatgtattagatgaagtttagggaaaccttattagtatacttaaagtttagaacaatcgatcggccagtgacttggctattttactaggagataggtttcctagatattagtctttgctgttgggcttgaatatattaaagccgtttcggagctgtattaccacaatattgcaattctggtatgtaacgatagtaagcctatgataacctactaatgaagcccttgaccctatgtccctagaattcgttgcctaccacgtgggttaaataaactaaatgctcgtctactggacttctagtacttcgtactatataaaacgatatgactatctagaccataaggatgagtagttagagttgtaaaagttagaaagggtagtaaattatgatctttgctaccgagaaggtgaggatttacctctagcgatagcagctaataggatagaataacccctaagattgtaattagaagaaggatagctaccactctaactgtgtaatataaagcgtaacgcagttacgcttgagtcctggtatgggttattgtatacccgtctacctaccataagagagaacctaagcctagataatctaaaaagagaaggaagagtacaatgacttacagtaggcaattaaagtaagtactaactactgtggccgtaatctttgttaggtataagaaaagtgtaaatagcggaaaatagattattaactgatatggtgcactagggaggctttgtaggaaaatgcttatttagagatactgatgtctggtggttaatataaaactgagaaataacgtgatggtatataccatgagtatagagggaaataaactggttatccctaatatcacttctctccctatcttacattttctgctctagctcagtcctatgtatactgctagtagaacgatctttggcgcaaatacggtaaggtcgagtttctagtacaataaggttttctaaactgctcgacgagaccatatgagaaggatacagctagctagtagtaacactgtggctagtagtgtatgtaatatagttggaatctgtatgactatcttatggttgaggtgtaagaataaaggggactttagctgactttatgcctggattgttagctatggtgcttactagatttgctctgtgctatgggttctaatgtcatgaagtcagctatcttgtgttacctaaagaaaatggcctaagtctaataagtctgttatatgctctctattcgtctttctagatgatattgtctctcttaggaaccactaagtccctaggagcctgatataagctcctaggaaccaaataaatgttcctaggagcgctataggcaattccaggagcccctaagcccctaggaacttagaattgggtcctaggagcgaagggctggtaaatgactatatggaatctgttaggcagtgctctgtgctcgagtttagtaataaactatctataatagggcaatctataaagccacaactgtatcctatctactgaactattattactctatattgccataaccagctgtagaaagtatatctcttatcgaattggcggctacctctgttctgttctgaaatagaataaaccactaatataatcatggtatgatagtcgttacttctaagaagctatacttatttattaaggcttacggagactaataatgagatatagactattaagttactcaccactatcctagacttaccgaccgagattctttgggttatagccgataccctaaggggaaacgaaatttctactcttacccgaactagccgaatactctatttaaagctacggttggtcttgatcaaatataatattaagtaccagaacagttctatatttcactgggctgctaaagctaactgtaccaactttataaaaaccttactctcctactgagctaacgttaatgtattggttgatgattgcttccctttgataacagctatgtaatataggtccgggttgacatttaagctcttcctgaagaattaaaagatagaagtcaacctgaggaataaggctagaaagagtgttttgtggtatagtgtagagaaaaattcatctgccgttgtgaaaaggctcctctaataccctgatattgagatagatcttttgtattgctagcgctaaaccgcactctggcttgcagtcttttatgaaagtaaagagcttgtggccatgctgctctctaaaggtgctaaccctgatgcgatagattaggatggtatattgccttggatcgaagcctatattaagaatagggagcctattaaatatttgttcctagattattgtagaacagtgtgccccgagataaagagtgagacgtgtaccggtaatatagaaatgattagggatgatacgaatagtaaggaccctggtacgttatgaatgcggcttagctggggagaagacgttgatatagtggatcactagggaagaacggccttatatcttgcagctgctagtggaaatctatcggctgttaagttacttctcgataaaaaatctatcgattgtgatgtgctggactaaagaaacggcataccgctctatgtagctgcaatgggtggatatctcgcagtggtagatctattactgcgttaaaacgctctcgtaaactgtaaggacgattctagaaataccctgctgtggtatttaacttctagttattatgacgatatcatagagagacttttgactgaaaataatatggatgttaatatagtcggaggaggagggagatatagtgagccttctactttactatactatctggtaaggagaatggatacagttgttctacgatggtttcttataagactaactctcgatctaaatatctgtgtgggctttcgatcacctctctgcctagctataatagagggtaacattgcggttataagattgttccttacttataacgagcttgaaatcaatgctcgacatatatataaagattccctgctctgcctagctaccaaaagaggcaatgttaatatggtgaaattattggtggaataaggtgatcgattgaagattaaccagctgaacaatattgataaggagagtgtactttttgtggctgtctataatcaaagctttaatattctggatatcttgcttcagtatcctgccattaaccttaatttaagtaattgttagggcgaaactgcgttggggttggcagttaaaggaggagatgtgaaaatagttaaaaggctactccaggactcgaaacgtgttttaaacctaaaagttccagctcttagatcctataatagtcatgctatgaagaagcttattgaagataagatagagtggaaaagacaggacagctgttatctaagctaagatcggctgtttataagatatataaggtttgcctatatctaataacttttattaaataagaatagtctctggctgttatttatatcttattctttaaaaattaatcaagatttactccggatcattctagtattttattaggtaaacaggctagcgatatatattaggatatatggacgatcattttattatagcgactgttctgatacggggttatatgaaagataggcagagtattactctaaatgagcctataataaatagactgtaaagggatggagcttattacttaaaaccacgagagaaagctctttctacccttaggaaattaataatatgaaaagtaaggcttagctgcctatatataggtaatcgtctctctctctaagttattgataactgtcagaatctaggatgaatactgtcatttttcatccctgatacagttggatcacgtgactnnnnnnnnnnnnnnnnnnnnnnnnnnnnnnnnnnnnnnnnnnnnnnnnnnnnnnnnnnnnnnnnnnnnnnnnnnnnnnnnnnnnnnnnnnnnnnnnnnnnnnnnnnnnnnnnnnnnnnnnnnnnnnnnnnnnnnnnnnnnnnnnnnnnnnnnnnnnnnnnnnnnnnnnnnnnnnnnnnnnnnnnnnnnnnnnnnnnnnnnnnnnnnnnnnnnnnnnnnnnnnnnnnnnnnnnnnnnnnnnnnnnnnnnnnnnnnnnnnnnnnnnnnnnnnnnnnnnnnnnnnnnnnnnnnnnnnnnnnnnnnnnnnnnnnnnnnnnnnnnnnnnnnnnnnnnnnnnnnnnnnnnnnnnnnnnnnnnnnnnnnnnnnnnnnnnnnnnnnnnnnnnnnnnnnnnnnnnnnnnnnnnnnnnnnnnnnnnnnnnnnnnnnnnnnnnnnnnnnnnnnnnnnnnnnnnnnnnnnnnnnnnnnnnnnnnnnnnnnnnnnnnnnnnnnnnnnnnnnnnnnnnnnnnnnnnnnnnnnnnnnnnnnnnnnnnnnnnnnnnnnnnnnnnnnnnnnnnnnnnnnnnnnnnnnnnnnnnnnnnnnnnnnnnnnnnnnnnnnnnnnnnnnnnnnnnnnnnnnnnnnnnnnnnnnnnnnnnnnnnnnnnnnnnnnnnnnnnnnnnnnnnnnnnnnnnnnnnnnnnnnnnnnnnnnnnnnnnnnnnnnnnnnnnnnnnnnnnnnnnnnnnnnnnnnnnnnnnnnnnnnnnnnnnnnnnnnnnnnnnnnnnnnnnnnnnnnnnnnnnnnnnnnnnnnnnnnnnnnnnnnnnnnnnnnnnnnnnnnnnnnnnnnnnnnnnnnnnnnnnnnnnnnnnnnnnnnnnnnnnnnnnnnnnnnnnnnnnnnnnnnnnnnnnnnnnnnnnnnnnnnnnnnnnnnnnnnnnnnnnnnnnnnnnnnnnnnnnnnnnnnnnnnnnnnnnnnnnnnnnnnnnnnnnnnnnnnnnnnnnnnnnnnnnnnnnnnnnnnnnnnnnnnnnnnnnnnnnnnnnnnnnnnnnnnnnnnnnnnnnnnnnnnnnnnnnnnnnnnnnnnnnnnnnnnnnnnnnnnnnnnnnnnnnnnnnnnnnnnnnnnnnnnnnnnnnnnnnnnnnnnnnnnnnnnnnnnnnnnnnnnnnnnnnnnnnnnnnnnnnnnnnnnnnnnnnnnnnnnnnnnnnnnnnnnnnnnnnnnnnnnnnnnnnnnnnnnnnnnnnnnnnnnnnnnnnnnnnnnnnnnnnnnnnnnnnnnnnnnnnnnnnnnnnnnnnnnnnnnnnnnnnnnnnnnnnnnnnnnnnnnnnnnnnnnnnnnnnnnnnnnnnnnnnnnnnnnnnnnnnnnnnnnnnnnnnnnnnnnnnnnnnnnnnnnnnnnnnnnnnnnnnnnnnnnnnnnnnnnnnnnnnnnnnnnnnnnnnnnnnnnnnnnnnnnnnnnnnnnnnnnnnnnnnnnnnnnnnnnnnnnnnnnnnnnnnnnnnnnnnnnnnnnnnnnnnnnnnnnnnnnnnnnnnnnnnnnnnnnnnnnnnnnnnnnnnnnnnnnnnnnnnnnnnnnnnnnnnnnnnnnnnnnnnnnnnnnnnnnnnnnnnnnnnnnnnnnnnnnnnnnnnnnnnnnnnnnnnnnnnnnnnnnnnnnnnnnnnnnnnnnnnnnnnnnnnnnnnnnnnnnnnnnnnnnnnnnnnnnnnnnnnnnnnnnnnnnnnnnnnnnnnnnnnnnnnnnnnnnnnnnnnnnnnnnnnnnnnnnnnnnnnnnnnnnnnnnnnnnnnnnnnnnnnnnnnnnnnnnnnnnnnnnnnnnnnnnnnnnnnnnnnnnnnnnnnnnnnnnnnnnnnnnnnnnnnnnnnnnnnnnnnnnnnnnnnnnnnnnnnnnnnnnnnnnnnnnnnnnnnnnnnnnnnnnnnnnnnnnnnnnnnnnnnnnnnnnnnnnnnnnnnnnnnnnnnnnnnnnnnnnnnnnnnnnnnnnnnnnnnnnnnnnnnnnnnnnnnnnnnnnnnnnnnnnnnnnnnnnnnnnnnnnnnnnnnnnnnnnnnnnnnnnnnnnnnnnnnnnnnnnnnnnnnnnnnnnnnnnnnnnnnnnnnnnnnnnnnnnnnnnnnnnnnnnnnnnnnnnnnnnnnnnnnnnnnnnnnnnnnnnnnnnnnnnnnnnnnnnnnnnnnnnnnnnnnnnnnnnnnnnnnnnnnnnnnnnnnnnnnnnnnnnnnnnnnnnnnnnnnnnnnnnnnnnnnnnnnnnnnnnnnnnnnnnnnnnnnnnnnnnnnnnnnnnnnnnnnnnnnnnnnnnnnnnnnnnnnnnnnnnnnnnnnnnnnnnnnnnnnnnnnnnnnnnnnnnnnnnnnnnnnnnnnnnnnnnnnnnnnnnnnnnnnnnnnnnnnnnnnnnnnnnnnnnnnnnnnnnnnnnnnnnnnnnnnnnnnnnnnnnnnnnnnnnnnnnnnnnnnnnnnnnnnnnnnnnnnnnnnnnnnnnnnnnnnnnnnnnnnnnnnnnnnnnnnnnnnnnnnnnnnnnnnnnnnnnnnnnnnnnnnnnnnnnnnnnnnnnnnnnnnnnnnnnnnnnnnnnnnnnnnnnnnnnnnnnnnnnnnnnnnnnnnnnnnnnnnnnnnnnnnnnnnnnnnnnnnnnnnnnnnnnnnnnnnnnnnnnnnnnnnnnnnnnnnnnnnnnnnnnnnnnnnnnnnnnnnnnnnnnnnnnnnnnnnnnnnnnnnnnnnnnnnnnnnnnnnnnnnnnnnnnnnnnnnnnnnnnnnnnnnnnnnnnnnnnnnnnnnnnnnnnnnnnnnnnnnnnnnnnnnnnnnnnnnnnnnnnnnnnnnnnnnnnnnnnnnnnnnnnnnnnnnnnnnnnnnnnnnnnnnnnnnnnnnnnnnnnnnnnnnnnnnnnnnnnnnnnnnnnnnnnnnnnnnnnnnnnnnnnnnnnnnnnnnnnnnnnnnnnnnnnnnnnnnnnnnnnnnnnnnnnnnnnnnnnnnnnnnnnnnnnnnnnnnnnnnnnnnnnnnnnnnnnnnnnnnnnnnnnnnnnnnnnnnnnnnnnnnnnnnnnnnnnnnnnnnnnnnnnnnnnnnnnnnnnnnnnnnnnnnnnnnnnnnnnnnnnnnnnnnnnnnnnnnnnnnnnnnnnnnnnnnnnnnnnnnnnnnnnnnnnnnnnnnnnnnnnnnnnnnnnnnnnnnnnnnnnnnnnnnnnnnnnnnnnnnnnnnnnnnnnnnnnnnnnnnnnnnnnnnnnnnnnnnnnnnnnnnnnnnnnnnnnnnnnnnnnnnnnnnnnnnnnnnnnnnnnnnnnnnnnnnnnnnnnnnnnnnnnnnnnnnnnnnnnnnnnnnnnnnnnnnnnnnnnnnnnnnnnnnnnnnnnnnnnnnnnnnnnnnnnnnnnnnnnnnnnnnnnnnnnnnnnnnnnnnnnnnnnnnnnnnnnnnnnnnnnnnnnnnnnnnnnnnnnnnnnnnnnnnnnnnnnnnnnnnnnnnnnnnnnnnnnnnnnnnnnnnnnnnnnnnnnnnnnnnnnnnnnnnnnnnnnnnnnnnnnnnnnnnnnnnnnnnnnnnnnnnnnnnnnnnnnnnnnnnnnnnnnnnnnnnnnnnnnnnnnnnnnnnnnnnnnnnnnnnnnnnnnnnnnnnnnnnnnnnnnnnnnnnnnnnnnnnnnnnnnnnnnnnnnnnnnnnnnnnnnnnnnnnnnnnnnnnnnnnnnnnnnnnnnnnnnnnnnnnnnnnnnnnnnnnnnnnnnnnnnnnnnnnnnnnnnnnnnnnnnnnnnnnnnnnnnnnnnnnnnnnnnnnnnnnnnnnnnnnnnnnnnnnnnnnnnnnnnnnnnnnnnnnnnnnnnnnnnnnnnnnnnnnnnnnnnnnnnnnnnnnnnnnnnnnnnnnnnnnnnnnnnnnnnnnnnnnnnnnnnnnnnnnnnnnnnnnnnnnnnnnnnnnnnnnnnnnnnnnnnnnnnnnnnnnnnnnnnnnnnnnnnnnnnnnnnnnnnnnnnnnnnnnnnnnnnnnnnnnnnnnnnnnnnnnnnnnnnnnnnnnnnnnnnnnnnnnnnnnnnnnnnnnnnnnnnnnnnnnnnnnnnnnnnnnnnnnnnnnnnnnnnnnnnnnnnnnnnnnnnnnnnnnnnnnnnnnnnnnnnnnnnnnnnnnnnnnnnnnnnnnnnnnnnnnnnnnnnnnnnnnnnnnnnnnnnnnnnnnnnnnnnnnnnnnnnnnnnnnnnnnnnnnnnnnnnnnnnnnnnnnnnnnnnnnnnnnnnnnnnnnnnnnnnnnnnnnnnnnnnnnnnnnnnnnnnnnnnnnnnnnnnnnnnnnnnnnnnnnnnnnnnnnnnnnnnnnnnnnnnnnnnnnnnnnnnnnnnnnnnnnnnnnnnnnnnnnnnnnnnnnnnnnnnnnnnnnnnnnnnnnnnnnnnnnnnnnnnnnnnnnnnnnnnnnnnnnnnnnnnnnnnnnnnnnnnnnnnnnnnnnnnnnnnnnnnnnnnnnnnnnnnnnnnnnnnnnnnnnnnnnnnnnnnnnnnnnnnnnnnnnnnnnnnnnnnnnnnnnnnnnnnnnnnnnnnnnnnnnnnnnnnnnnnnnnnnnnnnnnnnnnnnnnnnnnnnnnnnnnnnnnnnnnnnnnnnnnnnnnnnnnnnnnnnnnnnnnnnnnnnnnnnnnnnnnnnnnnnnnnnnnnnnnnnnnnnnnnnnnnnnnnnnnnnnnnnnnnnnnnnnnnnnnnnnnnnnnnnnnnnnnnnnnnnnnnnnnnnnnnnnnnnnnnnnnnnnnnnnnnnnnnnnnnnnnnnnnnnnnnnnnnnnnnnnnnnnnnnnnnnnnnnnnnnnnnnnnnnnnnnnnnnnnnnnnnnnnnnnnnnnnnnnnnnnnnnnnnnnnnnnnnnnnnnnnnnnnnnnnnnnnnnnnnnnnnnnnnnnnnnnnnnnnnnnnnnnnnnnnnnnnnnnnnnnnnnnnnnnnnnnnnnnnnnnnnnnnnnnnnnnnnnnnnnnnnnnnnnnnnnnnnnnnnnnnnnnnnnnnnnnnnnnnnnnnnnnnnnnnnnnnnnnnnnnnnnnnnnnnnnnnnnnnnnnnnnnnnnnnnnnnnnnnnnnnnnnnnnnnnnnnnnnnnnnnnnnnnnnnnnnnnnnnnnnnnnnnnnnnnnnnnnnnnnnnnnnnnnnnnnnnnnnnnnnnnnnnnnnnnnnnnnnnnnnnnnnnnnnnnnnnnnnnnnnnnnnnnnnnnnnnnnnnnnnnnnnnnnnnnnnnnnnnnnnnnnnnnnnnnnnnnnnnnnnnnnnnnnnnnnnnnnnnnnnnnnnnnnnnnnnnnnnnnnnnnnnnnnnnnnnnnnnnnnnnnnnnnnnnnnnnnnnnnnnnnnnnnnnnnnnnnnnnnnnnnnnnnnnnnnnnnnnnnnnnnnnnnnnnnnnnnnnnnnnnnnnnnnnnnnnnnnnnnnnnnnnnnnnnnnnnnnnnnnnnnnnnnnnnnnnnnnnnnnnnnnnnnnnnnnnnnnnnnnnnnnnnnnnnnnnnnnnnnnnnnnnnnnnnnnnnnnnnnnnnnnnnnnnnnnnnnnnnnnnnnnnnnnnnnnnnnnnnnnnnnnnnnnnnnnnnnnnnnnnnnnnnnnnnnnnnnnnnnnnnnnnnnnnnnnnnnnnnnnnnnnnnnnnnnnnnnnnnnnnnnnnnnnnnnnnnnnnnnnnnnnnnnnnnnnnnnnnnnnnnnnnnnnnnnnnnnnnnnnnnnnnnnnnnnnnnnnnnnnnnnnnnnnnnnnnnnnnnnnnnnnnnnnnnnnnnnnnnnnnnnnnnnnnnnnnnnnnnnnnnnnnnnnnnnnnnnnnnnnnnnnnnnnnnnnnnnnnnnnnnnnnnnnnnnnnnnnnnnnnnnnnnnnnnnnnnnnnnnnnnnnnnnnnnnnnnnnnnnnnnnnnnnnnnnnnnnnnnnnnnnnnnnnnnnnnnnnnnnnnnnnnnnnnnnnnnnnnnnnnnnnnnnnnnnnnnnnnnnnnnnnnnnnnnnnnnnnnnnnnnnnnnnnnnnnnnnnnnnnnnnnnnnnnnnnnttgttttgtttgttttgattactaagttgtccatcagattgtcatgttttaggactattgtcagttttagagagttagagaatttattaagatttttctgccacaaaatacactcgccttaccaccgtttttccgtcagatcctccccctctcccccctataaagagatattaaaaagaggggttatataggtataagttatcctataagacattaggagatatcagatttacaaagtacaaggtagtcttacttatatccctcttatcaaagaggatacctacctaatgtatccaaaattatctttcccttctctagataatcacatctacctatctatccgtacaaccttctgcgttagaaatacttttactactttaaggatcataagagctacaaattctacagctatctcctttcacaataacttaccgcggaaattggcgatctcagggcaatacgagcaaccgaggaggacccaatagcttcagaaagcgcaatcagtcggaaacattctatatatactttcgacgtggtatatgctactacggtgagaggtacagattctcgcatgatataaataaggcttccgactttagatcaaacccggctatataccatcccataacctataatctagacgcttagaatcaatactttgactagaagaggttcctgagaaacgggatatcaagatctatgtattctctgatgaaacaagaggagctcctttaattctagaacagggctctcgaaattctggaaagcgacagtagagagaatcatcagttcctcgccaaagatcttatgaataatgagcttcatagatatgattttatcctggtaactacggaggcgcataattctaagggaattattccagcttataataagctgttccttaaagtcattacctatcattctctcttagactgtctttctatcgagtcatatattagcactctgtatatatccttcggtagcacaaatagagattgagcgatcagatatctgagtaatatctaccagagccttataggcagaggtgaagaaaccagcgaatttaccttagttatttcactagacacggtgaaattactgttaaataccctttaccagctcttatcaagggtctaacgcgcttaatttcacaatgaactccccgtactacttaacctagcccacaaactggcctctaaaataacagaagaatgctcgaaagctgacctcaatggacttcagagcagaatagaagtcatacagagcctagtaactagcataagccgcaaccttattacacccagggtatatgagggagatccccagaggactaggccagtcctatcgtcttttccaatagatatacaaatacctggcgggagatataataacgacctcacagatatatccgaaattctaattcttcctactcttagagagattattaatatcaatccagaatatctaccctctaccaatttcctacaaccgcactttctcgccgaccctttacaaagatatattgatttaacgttccgactgctataccacaatatctttagctctacaaaagatattcttagggatctgtaacagtagactgatttaatataaagtccttatctatcaggtaaggatagcgcggcacatctctacctagggacacaagttcagcacatatttatcaataataggaataagcttaaagcaactatatccttttctattctaccatagctccgcaaaaggacctctaaagagtaatccaaatagtaggaagactctagtcgacttaataaaggaagccttatctactttttaatatcccaaggaactcatagaaagcttatcttcctcgaagtaactgtaaagaatacttccaaaaaccaagtgtactagaataagaacagtcttatatctaacagacattcacctagtattacagttaaacttacggcttatttataatataaactaatattcctaggccagctttatagtgagagacttactagcattctagttaaattctatggcttaatccctaccacattcgtccctatcctagaaaacctacaataaatccaatgcgaaggggatttagcattccgaaagtaggtcttactagactataagagtaataaagatcgacacaatatccccctaccggcatatatacgtaaaccagggtttatctttcccctaacttcaatcgcaacccctaccgctaacaacgttacattagatccgagtacccctaagtccgttaataccttaaagctataaactcagactggtctagattatagctagtatcagggacttatcgcagctctcacacaagagtataccctaatccaaggcctactaagcaccggaaagtcctatttaggcgttaaggttatccaagctctacttaaaattaagaaaaatacaaaccttaaaccaatcattatgatataagtagtgagttcataccttccagtattcttacttacaggaaccataggtattataccaaccataccttagaccaattcttaaagcaccttcttaatataggcatctagaaagtgatatacattagtggccgcagtcaggcccctaagcttaaaggtaagaaccttcgcgttatcagtaaagactttaggaagacaaaggtagaatcgcagaccctcagcaagtcctatagggaactcgaagcccatatggaagatactggatatataatgaaacctctacaccagtcttaaaagggcctatcttaggccgctatagggaacttcgtgcacagaaaatagcctactatatataagcagcttaaccgactggatctagaagggttcataactgtcacagataacaaattgctttattagcttagggttaaatcgataagaatccagaaaggtcagaacgaggataaagttgatattatatgcttagaacgcttaacacatactacctaggaagatatttatactcttataaacccagaacgccagattcttacaatggagtggttcaaatagtagcgggaaagcgaaattacctagatttttaaggccattaatcataccgcgagccttcgtaataacatcaatgcagtctataataaggtcaatcgctaagccctaattcaagtagatgtaatcggaatcataacaacatcccttatacgccacatcaagacattataccgcttaggattaaaggtcattatatacaaggaagcagcagaagtaatagaaacccatatcatctcagcccttatgccaggtattgagcactttattcagattagagatcatcgacagctgcaaccccagattcaaaattattcactcagtcttaaatcatccacaggaatagtatagcagctagacagaagccagtttaagagacatactctcggcgagctaggtcttaagcctacccctttttcacagcttaatatatagcaaagaataagacccgaaatctcgcaacttatcagaagggtctatcccaaacttaaggaccataaaagcaccacagctttacctaatattattagaataagggacaacctcttctagctagaccattaatacaaggaagacttaagagataacagtagctgtattaagtcttatagcaaccaataggaggtcgatatagctactactcttattcggcatcttgttcggtaaggagagtataagagcacagatattgccctcttaaccctatataccgggtagttacagaatctcaggacattgcttagcaaggatttcgagatttaccttagtaagcgagacctagaaaccttagctacagataggtttaagaaggtagaagataaggatctagagtcaaataattgtaaggcacttgagaaaaagatattacttcagacactccgccttgccacagtcaacaatttctaaggcaaggaggcaaaagtaatagtggtctccctagttcgcagcaataaaaagtgtaaggttggctttctgtgtaccgagaaccgcattaacgtgctccttagccgggcttaatatagcatatacctcattggaaatgctgaaatatatcttaatatagaaatgtgggccgatgtctactctcagctctcctgtgcgaatgcagttaatatagagttagctctatactatcctcgccatctagatatacctattctatgctctggtccttatgactttgaaaggaagagtccaaagggtaggtgtagtctcctgtataaccgacgacttgagctatatggccattaatgctaggctaagtgccattcgacggttatatacgacggctttatgtatagaaagccttacctatgtatccgatcaacctgtcactataaataccctaagctttgtggtgaatattgtggcctttgcttaacgaagattcaagatgttaagcttccttgtggttatattaagaaggtcctctattactattagatgttgaacctggagctcattaagtgcgatattgaggttgaaaagactgttcctaagtgtggccataaaattaaggttagctattttaaggatatcacgtccccgatcttctgttaccctgagctatacattgatatccttagctatggctataactgcagtgattgctatggaaattgtctctaggaagttgttaatagaagaagaataaccaagtatctgaagtatataaaaatatgtgaccgtctatatggtgtttataaccataggtgtcctaaggaataccacgatagggaaagctgcggttcctataaggcaaagtacaaagtaagactcgcaatcacccattatctcattattatacagaaacactaaccataccataggtccgatgctcgcattcagcatacgactcaacttataaaaaggcatatataccatacatcgagaaatatacctagtcctacgcctatcaaggctcctactcaataccttatacagcaccatacaatcgacttccctgcgataagcgatatactaaaaatcttaaatacagccactagtatctaagcctctatagggaaggttatccaaacaatctgtatcaaaagtgcggtaacaagagtgatactcgtattaacttcatcgaaataaaagactattctaaaatcaacctcgataaaactccgattatcatacttaaatacagttatttctttataagtaagtcggttgatagattagttggcctagatcaagtatacataagggataaagatagaaagttcgaagacctctataatctctcttcttctcttaccacagccataccctcatgccctaactgtaaacagcctattcgccaatttatgacgaaacattacaattgtgttatcaatcgtgctattatagacaagacttacaagcggttccttgccaaaggtcgcatagacctcataaaccttaaatcgcgtctaaataatattaaacacaagctcaactccaagggggcgtttctactccctaggaacgctgctacaaagcttaaagcacttgatatagaggccttaaaacttagcaaaaccatataggccgagaatcaaccgataaaacggcttatagatacgattactaccagccagaaactagaacagaacgaaattgcctccctattagccagaatagaggcaacgaatctagcaatccaggaacctaatagtcaaattactcttggcataaggctaattcagataaaatcccaagaaattgcaattagccatttgtttaaagttatatagttaagaaaagatcctctagaagtacagccaggtattaccaaagtatcactaatgttaacttaggtattagaaaattaccgagacttaataactcaggcatataaacgaagtctctaccgcatcgttatcatagcaaccatctcatttgcgaaaatcgcccagctagacgcgtaatatcgccgcacttatccagtaaaagcaatatcggatctaaatcccaaagaagctagcgccaattctagaaagctcgaaaatcgcactaaaaccatccgcgatctccttaccactatattaaaactatacaatggactagggaactaccctaagctctaagaacaggtccaggaaataacctatctctacgaagggccgcgatataagacagtaactttagaagaattagaatcaattaagacagccatagtcagtaggcaaagaggaatagcgactcactctgggcactagtataattgcgttaacggatatctagtaagtaaatttccctagtcttaatctatctactatcctaagttaccttaataggacaacttagctaacaatattttctagtttactattagagagtgtagtataccaatagagcaagctagatacccagagtatagagcacctattagaggtcaaaaccacacggccgttacaggtgtatctcaagcgcgggaaatagagtagatagaaaccatattatatttcaattatagtaggaaaatatatgttttcttttctttccctgatactatatacgaatctaaactcaaatgtttttagatagtttatcaagcgtctataccttatcctagctattagggatatatataaagtatacaggatatttagagaaatgatctgcaggacccacatagcatatataggttcccctaaacgcgaggaagcctattccttttacttcctcgcgctatatcttatatctagagtcgactatagctttctttaatattaactacttatctaaatacactatccttatctatagatacgtgagaccctcacaaatagatactacattactgggaatagatgctatattactagggatagatactacgtttctggaagtagactaggatctatgaaaccatatgccaatcgatcgatcaattaattcatagtctatcccagccttttagaaaacattctcagccacactcagataacagcaagactatcgttttataggtctagctctataaccatatatataaataattatatatatagaactaaacaaggataggaattatagaagataagaatttgtaaagccttaggtagcaaggcttctagaagaccaggacagtagttttaaatgagcttattctaaaccgcgaacttaaaagtatcctttaaccctaagtagaccctcagccatacgatagtagggaacttatggttctccaggaggctgattggatataggtatttagcggtttgaaactacgaccccttaagcctttctgccgttaaggctcgttatttattattgtctcgtatatatatactaaataaagcaggtaagttattaaatccagaaagacagcttctcaataatataaaaagggaaatattaaatagcctattgatattatgaacctagacatgctcactactctttagcgtcaggcgctgtcgttatctccaaaacctatcgtattatgggtctattcttttacgtctataaatactactatagataggaaggctaagattactataaggggttttctaatataacgagcatatattaaacagaacttatctccagttaaagaagttagaaaatagagcactatcacagaaaataatatccagatccaaggttgatttttcttaagcatagataaaatagagtactttaatttaacagaatacctataagcctcccaattaatcggtatataactcaacacggtacatataagttgaagttttctactatatttagattagatagatggttattaaataaaacattataacaacccggtttattcaggtcactaaatcaatttctgaattctactaattaaaagctcgacctcttagggcattgtttctctctactagccccttctatatcctttccctcattttaccaataggcattatcggtaaggtttaggccgcagacgttatatctactcctatcgaacttcctcctaggtaacggctctcttatattacagctttttttctaggcccttattaaggggaccaaacactgtaagagatttccaccatatctctggtcttaagcatctctactaaagccgcagtcgaagcatagtttttgatcgctttaagggaggttcagggctattagcagccttattctttagcgacggttatatattaaaataatagtcaagtaaaggcatggtatcagatatatcttataagcggtacattgactaacgagagatattacttattatccaaaataatataggaggggatataatactttaactaggggaaatcaggctatatatcggtctcccttatcattactattactagaaagtactccgtcttatagaacctagataataggtctctcgtcccttatttagtcgaatagaataagaaattagtggtcggtggtaggtccatacttaggcagccgataaagttaattgtactgcctctagacttatctctctccccctatacctaactgcttaaacttaaggtcctattaaagattttcaacgtttttaatcttcggttaccggcttagccccactaggatgtttatacttaaacgataatataatttccgtcaaacgttcagtccttaacgccttaaataagatatttaatatataggctgaatatatagagggcttacggccttacttaacagaccaaaagcaatcatagtccttagtagtaataagaagcgtacgttcttcagataacagtgccgtaaggcattagcagcctatatatataggtaactatattccctcagtctaataagacgaattaacgcgcctcagttaaccgacttaaccttatcgtcgctcccagctaagtccatctatagctattaggcagggatagatacgcttagtcaataacggaatctaaaaagagcctattacagttgaacttaggtagtagaagtatgggcctataccggtctatttataaagaaataggccagttacttaaggtagttactccgtagacgctataggctacccaatcagaacgggaccacctacctagagaagaggtaagcatttttatccattaagccgccccgagggcctatataacgctgaagatagacacaaaacgcgaccggcatatagcaaaaaggaaagcagatcatttatagcaaaaatccgcgaattagaatacgctaaccacaatataagcggcgagcttgaccgcacacacatccatctagaggagtccctcggtaaaaaccgcgaaatataagccaaagtccatcggctttaggatgagctagagtacaattcatcccaagcaagtcacttagaaaataagctagttcatatcataggggggattactaaagctatacaggtattataggtttattaggcgcaggagaggagtatatcagattcgtatagagacagataagataaatctggtaatagcatagacagcacagtactaggaacgctagctccgatatacgatagcttatcttaacctctttcatattacagttactgtataggcgggcgttatacatatacgtataagagctatttgctaataaatgtcatattataggcgaacgatagcgaacacgttattagggcttttcacatctagactatttagtaggccttgcgattacagaaaaaagctgcgaaggagagtcaaagcttcggcgtattttcgtgtttccatatcgcgtatttacgttatcttattgtaagctaaggctccagctaataggacttttaagtgggtcaaagttgaacccctataataggaaatatcattttacttcaatggtactgcgtttatagtaatacgaataatacgtttttagctataaatttactaatatttatttcgaataactttaaagggagagtataggcataaagggcttatctgtactatagatagccgtaatataaggttcataggtaaaacattcaagcgtactatatatatatatatatataatatatccttagcttcacatatcactgattctatggcatatattacagtgctaacccaatttgtacacaagacactaccggtatttccatctagctaccacccacaccaatactagaaattagcccaaacagtaaaggctttctttatatactagcgcttaaaggtcaaggtaagtaatattagtcattttacctaagccaatatccgatcaccttccttacctatcaatatattcgggaagctaataccttacctaatataacgcacttatatgcgcttaaatgactcgaggttataataagcagtcttattagccacgtttactagtatcttcagttcgcccttatcccctaattactcgaagagtttgctctgattggttagtatatagtggggttaactaggcggttaaggcttacgcgtaaaagctcttccggtaaacagcagcttttcaactccttaggcagacctttagcttcagtactctataggtagtatagaggattctttataatcagcctttttacaacctcagccaaagcgaatagctttagaattactgcgtctatctcggctatatcgatttggcagctatactctactcccgctataacatagaccaccgttagtaaactatactcatgtggcctaccagctatactcagtttccctacttaccgatcctaaccctactggactctataagtaacatggtatcggtacttaaggcagcgagggctctcccacaaccgcgtaggtattaaattcctttaaggacctatcaggtataagtaccactttctcatatcgggcgctaagactagtacttaccagccgaataattacagcaacctcacccttagtaatagtatacctcgatactaggatctgacttactaagagctctactgactcctagactaaaaatacctaatcctcccaatagtagcaccctaatagacctagaaagctgggataagagaattgactcctggtttctaacagtggcttaatagacgaaaactgctgctttagaaggtggatattaaccagagccactttattgtttctataccaggccaagaagatagactatccttaggaaatcactacgatcgcctcatatgtcagccataggttttagaaaaccggctgaagattctaagcttggtcttgatccttcagctacactagttcaggataagccagagtagaagtagttaccgctaggtcgggctagggcctagaagacggtacagatagataggttggtttttttaaagtagcctaatcgggtattccgtcacaccatacagtaggaggtctagatagctaacgctaaatggaatctatcttagaaatatgtcgagtacaaggggatagctttaatttagcagtaccaggaaccctaagtagagggaaatgttacagagtggttgaggcatccaccctatttaatattaatagagctatagagataactaccaccctatagaactagattaatactaacctattaaagccgagtataggctattatatagatatctaacgacatcagtaatcaagcgttaaaagttactattatacaaacggtcgtcacagtagaaaccggccctatcccacaaaaatgtataggttcaatgtttatatatcctagaattggaataagataaggtactgtttgtctttacttagaaacgatagtatatatcaccctaggtaaatcccataatatcgaataaaatagtctcatatattcatcagccacctcttacttatctgaaatctactcctacagccggaagtaatcgggaacctatctctgtcgagcagatcgacgaataatagataagcttaaggggatagagaccaggaaacgatctgaataccgggtaagccgaagcgattaaagctacgagggtactgttagaataaccgacccccctactatatatatgacttcgagaggcatttctatagttgactcgctagtaacatctctagccaccgaagaggaaaggagagcgctaaaagatccgtggcatcgactgtatccataattagtaaatagaccataggaataaagggtgataagttatatactgtatcaggtaagaggtattattcctaggcaaccgataggcaagccagccgtctatataccctaaatgaaccacccccttacgtacattgcattacagtataataggatcatcgctatcttccttaaagcagatcggacatacctcgccatctgaataagacccttagtcgaagctataaatctagatacagtataacccaccgtacttattgttaatagataggatggctagatcgttcggtaaaacatcctagggcacccgatccattgcaagtatatctgacgtaacttcacaactaggagactgagatacctctaaccatataggggcaggaagtcccaggaaggtgatctcgttaatatcctatatcggaggagagagtgtatatggcttagaagaaattccagctgattcctcttctatattatcaacctcttcagctatagatagtgagaaaagatggcgcggagatatctacgcgtggacttggttacacacagctgcgttaaaccaccgctttttaacatcgttctattaacgttcttaatactatctcttacagaggaaaaagaagataataccatccagctgagagtcaagcgtagaaagatcgaataggctccgtacaaggttgttcagcttataccgaccttctttcagggtctctttcttcacagtgagcttacaagcatttcctttctaggtaatgccacagcaggacttatcctccctaaggggccccatctaacagacagccaaggggtcccaaagctactaagagtctaacatcttaagcgcagaatatatataggggagaaggattcaagcaaatctaaaatacaatgattatagtagtagaaagtcaaaccattgtaaagatctagttaagtatatatagtaaacattttctcttaaccgcaattataatacgtattagctatatagaacgcaacgacaattcccgactcccagggcagatagttatattcccgggagcactcggtctcctaggggctaaacaagagttcctaacagccatctagcgtaccctaggagctaccattatctataacattcaccaatagccgtaaaggctctatacctcttttagaaaggtacttagaccatctaaactagtcacatataaggctccactgtgccctcgaagcactttataaaagcaaaattcttatataactaaagatatacacctttcagccacttactctactttaaaaatttcactttaagttaaatcgcggtcatcattatatctacagcagatactcttttcatcgctacaaacatagactagagctctaactatatacaatcaatattcggtcgaattatcggcgatcccacttaccgtttagaatatatataggtcgaagagaatggaatttattactgaaataccgtatcgaaagagtcaaggagaaatagagcaatatacctcaagacatttcaagagcttcttatcggcaattcacctacattaagactctcaaaggcagcaagttatatactatatacagaatacagatattattcctctagggccaggaagtatacccaactatagatacatttacttcacacttaagccaaccaagttaagagaaccacaccaattcagcaacataactacaaccacaatccattagcacatcactggccaactggtatatcctacggcattagcagaaccgaataccttctatcagcgcctctatcttatcatataacccataataagtttttataggcggtaaaatagaggcagaaatctctcaataaaggatatacacaacgtactcttcgtacatccagaaataccagagatcgttacatcgaggtcttagttaattatttacaaacaaataggccttatccaaaccgttcggcctaataacagccatcaccacttaaccatagtcaaaacaatatcctcttccttactacctcctatattacccttttgaccagatttccccctacacggtaacgaccaagcttattagctagcctattaatagcgctagccccactacattccccagaatagcactcgcctatatctatttagcatgaatatatattcaatcttactagagtgtataccaaactcagagttacctatacgtaggtgtaattcctagggtctatcactaggcagtaactctagtaatagagctatagaccgccgaacgtagtcctattcaaatgcagcctcaagggtatcagaagcaggcttgattcatagactagttttagcaggccttagagaatcttcccccagaataagctaaagctcttgcgtcagcttctaggtaagacgaaaatccatatcatcttaaattaaaatggctctatggcttttttaaaaaagtactatgaaataaggaagtaacggtatatatccaaacaaggatatatatatatagaaacgaacccgattaaaatactaccaatactattaatagcagaaggtcaaagcagatcctacgtacatataaccgttagtaacataaggcttactgtttatagcctcagtcaagttagcaaacggatatcaacatataggaaataggaactatacacattcataccatcgtttagcattaagttagctgctctgttctacaacctttataccatcaatttccgagtcaccgacatctctatcgctagtatctaactcctatatttccaactgctttaacaacacatcaaaaattacatatattaactccggctcatgaccaggttccttagcaccgcgctccttcaaaagataaattatcatacctcccatcttctgagtaagtttatagaagatatccgccaacctagatatatggtccctatcctcaattacatgttttaaggtagcctgcatatcacctagtgcttattcgagcttagtctaggctctttctacccagacggcccgagtgtccaacctagcaaggatacgaagatactcctattctcaggttagataggcttctaaggaatcctataaacctaccaagggatccatattataggaatagtaaggaccaagtcgtcaacagtaggcagcttaaaccaagaagcagctcaacagttctatatcaaaaaaggaagttttactagcattaatagctttatatccatagctatcttctaactaaagccgtctcggacccctaatagacttccctttctgcaagcttttaacgggccatattagcttatttctggccatatacagttgcacgagtatagaaactgccttcaagcctaaccatctgtaatgtaaccggccaaactttaaatccagaaacctaccagatctacacattaacaataacagactaggacaagccacgcaatttttattaatacccgttagttcttatggcgcactaccctagaagggcctcccgaggatatttatcacaaattggaacttcggcgtcaaagcttgtaaggacagactctctacctagagagcaaaatacagccctaattctaagaaaagggtgaagagagaaaacagaaggagaaaatccaagggcgccacctgggaaaagtcgaccgagccggtatcatataggacagaatctaggcataccagctagtccaggccaaatcgcgtaccgtaccctggtatacgcctcctaatcacagattaatagaaattataccacaggattaaatttaccggtagtccacaatatactttcgatttctggttaagtggcggcactattaaatcgcgatcgactctaaaggtagagtaccctataagcctccatatatcagaggcaatattattcggcctccctaaatggtctctaaaatgattttaaggtttaacgtcttaagcatggaccagcacgcggtctatatactctgtattgctctaaatacttacgtcatatatcatactatagaccttctctagcaattagccgcgacaagtgtaagccagagtatggttaccgtttctaggccaaatagatctataaggtcgcgattaatcctatttagaagacaaaattaccactattcttctaattattagtaggactctatcccccacgctaactgaatggtctataaaacgccggacaggtcaaggcacataacggatagcgagagccggatataaggcgaaaattacacgggccaggcaacacttagattgttagaataagtatagggttagtattctagtgatctatttattaaggatatttgtaagggctgcctaccggtatatagagtgctctatctcatataacgctcagtctaaccgcaggatcactagtaacggaacatcacaaccgttaaggagcctagcggttaactgatagtaaacagaaagcagggagtaaaaccggagaagaaaatagtcaatagccggctaccggaatataaccatatctatgatactacagggataaccgtttattacaggcctatcgtctctagtcaggccggtaaatagattttctccctaacctagtaacctcaaaatattgcggtccacataaatcggtagtaaatctactcatttcgccgtagtctagatactatccagtaccaccagagacctttaaagctcgcgttacccacctaaaccggtaagtctagagcaaaaaaccgtttcttcttataaaagcctctaatatcgtaactactttcagaggcttaacgttcaacatgccttcctatagatcggcaccccaagcccccgctagagctagctagagcattcctgagtcaaatattatccccaaacgcgctcggcagactactatcactagacctaatactacccctctgtcaggcactcaaggcacacacctacagccaccgctagtatatcctgccattaccgtcctgtgaatacaagtatactcagagctaaagcggaatctagtctccctcgccgatagctaagacccagaaacaaaaacattagaagattattcatcgactatacttataggtttttaaagacactaatagggagcgggacaagtcaatactttctatctagcgactagaggccgataacgcctaagccgcagcgaagatccaccagctaagcatcgaaaaagatcagtctctagtcacagtctaggtatttaagatataaatatagaatttaaaacagcaactagagaccgcgcagctcagtagtatagcgagtgatgacttattgccttagctgatacagacgagcgccgatttcatgattacatagaccaaactttctagcagagtagaagcagagaaaaacaaacgcctagccgcaaccctgcctacttctaatatatttcaaaggaactagtaagcctagaataggcaccttagaatacttgataccaactcgcttctaagttatttactactaagtacccttccgttaaccaattaataaacactggcctaagctaaccaacaagcaaactaataagccaaccaatatatatcgcccttctaaagataggcgtagtatagagaggaagataggtcgctttacagagaaagccatactatcatagtgatcttacgggcttattcatctagctaacatacaatagatatatacgtagctttaggctagtatataatataatttatacggctttataggtacctatcttataaatagaggacttagggaatatcgttataagatctacagttagatagatcatatcgtagaatttaagtgccgcgaataaactatagctaccggaagaaccctaatatcggcgtaatacccttagggcaaaggggaagcaatataggtatatattcaatttctattctcttatagctctgacccttctacacagagctcagtaatcacttcgattagccttttatagatatcttggcgtggtcttagcgtggctaggcctggcattttcaggggtaatttcgaaagagggctagccgtgatttacagatccggttcgcagatatatttttatctcctatccacagtcgggcgacgccttaattgccttccttactcgtcctttccttttatacgttttttcccccgctataatagagaaataatactaacggccctattatctagagattaacttatataacctacatttccttatagtgatacctatgggtgacctacttacagacataaggatacaatagtactaggggaacgaataacatctacgagatttggttggattaacgcataatatatcacgtattcctccgtaatacggtgactggtaattcgggccagatttagtctagtactcggctgtacgccaaaatatccgatcagaaccgggccgcggcacgacccatatcggcacggatcgcaagctttctttcctcgcatacatatatggcgtatagtctataagtcacaatccccttgatctaccgctatcacgttgacctcacgttatttatctagcctttaggcgttaccagcagccgcgaaccaggagttattgtactagctattgcgctaattattttggtatccagtcctactagtccttgacaagtcccgcagcaccaaggcaattttggtgctgcgatatggtgctgcgaggtgctgcggagctaagccaattttggtgctgttgtatggtgctgcagcaccgtcgcagcaccagttttagtgctgcgctagcataattctgccaagaattacccaaaatggatggataaaatgctgacttattttgatagattactgttttttactcatgtattggcattgggaggcagttatgctcactcactactgagattcgtatcaactcacgttcaaaaaataaattaaaagcttcaagtactatacaaatgtagatttaaagtaaaatcagcccaaaacagtatagaattagtggttgatattatatggaagagaatgtgctggtattgtgtgtggatatatatatttactctatgtatataccttctagtttgtaccttgtagtttcgattttatttttctacagtaaaagcctatatttcaccatttttttaaatagtatagtgctgcgaccggatgaattaccctatatcttattttgatctttataattaatatattgtataggctttgtataataacttgatgtactgtctattttccgaccgaggtcagaaaagtggactttaggcagctatgtagaataaggggataatgtagaccccgaaatacattatatcatagcactatatcgtggtgctgcgggagtgctgcgggagtgctgcagcactacggtggggctattataggagtcggaggtacatagccaatagatatcgagatttatattcggctttatgatctatctaccactatactaacatagtagacgctctccctgtttattgttagttgtgtcggtcgcagattttgtctaggtaggccatttgtgctttctgttttcccctttacctcacaccatatacctatacataccatttgcccttaaccttcaatatgtcacattttggacagtacgctgaggctggcccttcttcgcaggtatcttcatcgcaaattggatatccagaccgccttaccgactgcgactttctttcatacgatttaacacatgatccccttactcctgaccagtcaatcagccaacaaacaccaaatcccgaagccccctcaatccttagcattccagagttccaggctccacatactatcactgctccaacaaccctcgaacgaattggccctggagctaagaagctttgggtgtgctatacgaagatgaacaaaacacaatttattgagtggtggcgacacactacacacgcccaaccaaatacttcacgacgtaaagtgaactttgaagcgaattatacatcaccacattgggagcacttcgaccaggttgcacactatcagactggacagccgatggcactttgtcgacgatgtggaaaggcgattcctcatccatcacagtctggaggtcttcactcgttaaaaaagcaccatgagagcaagacctgtcagcagggtggaaggagttcttctcttcagcagacattaaggcaatcgctacagtttgcggtaatatatactatcatatctcaaaacgaactatatactaattcaatatatcttagtctgagtgtccttcggagcagaagaccacttttaatactgaggattgggaacgaattcaaatcaatttaatcacaatgtgtcagctccccttccagttcctcgaaaggccggaaatatttaaatttgttcgatttgctcgcctctcaaaagatatacctccaatcttgactcctaagacagcacggcgtcgcctacaaatgatggtcaagggggatcatcaaaaggccctttctcttttaccaaagaatgctaagctttcaatagcacctgactgctggacttcaccttttcaacaagcgttcatggcaattactggctattttgtggattctggctggaattatcatgagatactactaggctttgagccagtatatggtcagcatactggtagtcacctgagtgagatactacaggatgtactacagcagcatgatattattgatagagtgcttgcggtgactaccgataacgcctctaacaataaaacacttatggagagccttcaccagtcgatcgaacagctcaatctcccagatagcacacgagttgtacgaattccatgccttgcccatgtgatttagctcagcttaaaggacctccttggattgatgaaagccaacccaaacaatgataccgccgatactatctggtcggaggaagagaacaagtcggctcttcaaaaggccaaatctgagaaaggaatcatctatacacttgcaaaggtcagttattcaatatctttattaaagcatacttacaccatctctagatccgtgcttttgcagtctatgtcaacgccagtccccaacgacgggagttctttctaacactacaagacagtgagccgaagctcgtaccaatacaagatgtacgtacccgctggaattcaacatacctaatgcttcagcgcgcaaatcgtctgtccgctacatttaataggtactgtactctatataaccagcttcggttccagctaagtgcacaagagtggcggcaggttgaatacctgctttgtatcacaaaacctttttacatatggacagtcggactatccaaggttaaggatgtcactattcattgcgtgttcgaggtatataacagactgtttggacattttgaagactcccagaagcgcctacatcggaagaaggttccttggaaaaaggcgatgctttgtgctttgaaggctggagaacagaagcttgcaacttactacaaggatactgagaaggctcatgggcatctttatgcaatggggacgatccttacccctgtgcataagcttgactacttcaagggagcagactgggctggcgatgatgcggactggtacacagtatacgaaagctctctacattcctaccttaagcgatactatcagcgccagcctacaactcaatcagtagataaaggcaaggctccacaacgaactgggagtatgtctagtctacttgcacagacccgaccgagatcagctatccaagagaaggttggctggcgagaagagttaacaggttatctcaatcttcgtatgtataccatagaacttgaaaccatgatatatactaacttcgcaaggaactgatgatgatgacccatgtcaattctggaggcaacatgagacccagttcccaacccttgcggcgctagcccgggatgtcttctctgttcctgctactggcgcaggagttgaacggttattcagctcagcgcgggatgtctgccattacagacgtggatctctcaatgcaacgaccattcaagatctaatgatgctccgctgtatgacgcgttttgatgcgaaccacactcaaggccagctatctacagaaagccaggacccaagtgagaggatggaggccgatgaggaggcagaggcccaactatctgattatgatatggctggtatcagcgataatgaggaacttgagtctgaaactgaatatgtatctgaagccgataacatggacgcccatgatcgtgatgcttcacctggtctccaggacccaggcctacctctggatcaggagactctggatcaagagactctagatcaagagatagactcagttgaacttccaaatcatcacccaatagttagaattgtacaaagcgatagccagcgtccacatagggaacggaagcgtcggagagatgatgatgaatatgtatatactaagaggaccaaataaagcgcaaataatcaaacaaatatgataatgatcttttccagatttcctgtttactgtaaataaaataccccaaaattactggcttttctacataacttatgcatgtcacgaggttagtcgtgtttgcactgtttacagtgctgcgggacttgtcaaggcctaatccctagcgacagctcggcagctattcatatcgacagtggcgccggtcgtagactacgcgtctaacgtctagatgtacgcgtataaagataaggctattgggccgatcaaccgcgtctaaaggataggagcataggcgattctaggaacattcctcacagttacgaccaatatagcagaggcggaggcccaccttgccactgttcaacaccgtttctggagacgagctgtgaagatgtggacggacatacataccctgctagaaaccaaccctctccgccggaacacagcacgcatcaagaaattcagaagataccatcgttcgccgctgtatcaagtagcagacgcgctaagaacattgagatggaaatactggaaaccatcaatccgttcacattggcaccataggaagtacgcgtgcaggctgacgttataccaaccccgcagtcaccgaccgcaccaggcgggctaatgcagatcgcaaccagcagttcggcacggaatgggctggtcggatttggggtggcgatcgagaggcagctatctcggtatcgaaaactaaaactgaagaccctttccgtcacattgggtgcaagagcagagcaaaatccgttctctgcggagctagcagcgatggcacatgcattgaacatggtagttgnnnnnnnnnnnnnnnnnnnnnnnnnnnnnnnnnnnnnnnnnnnnnnnnnnnnnnnnnnnnnnnnnnnnnnnnnnnnnnnnnnnnnnnnnnnnnnnnnnnnnnnnnnnnnnnnnnnnnnnnnnnnnnnnnnnnnnnnnnnnnnnnnnnnnnnnnnnnnnnnnnnnnnnnnnnnnnnnnnnnnnnnnnnnnnnnnnnnnnnnnnnnnnnnnnnnnnnnnnnnnnnnnnnnnnnnnnnnnnnnnnnnnnnnnnnnnnnnnnnnnnnnnnnnnnnnnnnnnnnnnnnnnnnnnnnnnnnnnnnnnnnnnnnnnnnnnnnnnnnnnnnnnnnnnnnnnnnnnnnnnnnnnnnnnnnnnnnnnnnnnnnnnnnnnnnnnnnnnnnnnnnnnnnnnnnnnnnnnnnnnnnnnnnnnnnnnnnnnnnnnnnnnnnnnnnnnnnnnnnnnnnnnnnnnnnnnnnnnnnnnnnnnnnnnnnnnnnnnnnnnnnnnnnnnnnnnnnnnnnnnnnnnnnnnnnnnnnnnnnnnnnnnnnnnnnnnnnnnnnnnnnnnnnnnnnnnnnnnnnnnnnnnnnnnnnnnnnnnnnnnnnnnnnnnnnnnnnnnnnnnnnnnnnnnnnnnnnnnnnnnnnnnnnnnnnnnnnnnnnnnnnnnnnnnnnnnnnnnnnnnnnnnnnnnnnnnnnnnnnnnnnnnnnnnnnnnnnnnnnacactcaccgggaaatatatccttcttcctaggaggaaagtcgccttccgatgatcagaagtggacgccgaacttagaggcggtacggacctcaatacgattcgccatcgccacgggccgactcgaggccacctaaccatgccgacgaacataaatcaccccactctcgccgatctaacccaccaatcacctcgtgttacggatggtagacgcgcttcaactgccgaaaataggatgttgaacacttggagaagcgccttcaagcctgtctactaacgaaattactaatccacgaggatccgctgcgatacgaacatctgagatgacatattttgcaagactttttgtatgggctctgaggagacacagtgctatatatattatgacatgtatagtagatcagagatagttgccctttcggttcagccgccgggcgttaataaattgtgtgtgtgtgtaccaatttcgctgtactcattccgttttaccggaatctctggaaatatcgaactcttttggagggtaggttaccacctttttctcgccgagtgcagcgtgaaatggacatccaggaacgactttcttgtgtcgttgaataaaccaaggcgcaaattcagcatctattttgcggtaagacgcaatttcctgcgctttctctgctcccgacagcttttcctgttgttgccagtaggattctgtggggtctggcaatacggtctccacaaacaacatgaaggttcccaagagaaaagtgatgaaccaatccaggattgggttcacaggttcgatctggcacgccttcaaagttgtgggcagtgacagacaaattgcaatccttcgacccagccagcgtaagccaggcgggaaaaagcggaaggcaaactggtcaaagcaaccttcggccacaagatttgcacgctcaggtgcgatccccatgtttgattcgacttcctcgttgtacctcataaggtcatcccagtcagtggggaagctgtggataggcttgccctcaacgtggaacaatttggacatctcttgccaaaaaagatgagatgcctttttctgtttgtcgctaaagccaggaaaacctagctttagctttagacggtgcatagttgccgccgtgtaggtcaaggtatacacgtagtcctcgttgtgaccgaagtctcccggaaattgcttgctgtagtagacatggagatcattgatgtggttgactgatttctttgtaagagggtgatgaggtccatgccaccaccagattgcattgttgttggcagtctgctcgactctctgggtagccttgtagacaatttttcctccatctgaccgccagactgcacgagacccctgctcggtggcaatgaagttcgggaatgtgattgcgtagacaagattgagcataaattgattcaacccatagccggcagacagacgccaaatctcttcgtagtctttctcggggtctagtgattcgattctctgctggatccaataatatgggaggcgtgcagttgatgaggaatccatagttgattgatttgtcatgtgggatattgtgtgaggcacacacatggaaagatgatggtcagtagcaaaactgtagcgtaactgtagcggtcatgcgcgtatttatttaatcgcggagcgattaaatgacgctcggaatgccgcacggcattacgtcaatcagttcgccctcaggtcggctgatggagcgttgtactccggctcagcctgcgacaacaactggtctccttgagaggctgagtggtgctacattaagttgaagagtgggccgatgtaatggcccacggggagccgccggaaacgggggacggagccgagaggattcaattcatccgatgcagattctggttattctggttggctagcggccttcttgcattttactcattttactgccaccgtggaccaagtacaccggaatgccgcggagttagatccacgcacaaaattggatcatcgaaaggccctggagataccatagcaggcagtggccggggaaaagccggagaaaagctgggtatgtaacggataagtcggctggattggttcggcttttgctaggttccgctgactaaagttatattggggagccacgtcccgaggcccaggactgcacagctacgtgaacatcgcaaccagtgatttgccggttagatattcctctagatccgcaaaaatggttaaacagggggatttcagcggaatcgactgcagtatatttgcttaaccctcctttgctttctcatttcctcatcagtcttggtatactggtaactggtgtttcaagaaaaacccacatagtcggtgataatgcaacttttaacttcaattttagactattgaaatccatggcatagaaaataggattacagcatgatatacaatacttacacagctatgcagacgcaattccctacatcacgtcctattatctgttgaaagtagatgttataaagtcttcgggaaatgctagagcaaacacacgcaacaattgccacaccaaagcataacataacttagctgcttttgagtatatgagattgagcgatgcgatttcctttcataaggtctgacaaaagctttcgggaccacaaggtcaatttagcattactgtattaaatgcatgagattacttttcaagagcctttccttttccttcgaataaatattggcatgcattgttatccgtggggaactcgggaatcaggcccattaccggtgtcggcgcaataacgccggtataccggacgatttattaatcctccatgttttgtaatttatgctatgtataggcttctccaaaacccaacttgggtccgacttctataacccaacccaacccaagacccaatactgggtaccctagtcccatctcttggcactcctatgggaccaaatggtgggagttggcaaggtctataaccgcctactaccctataacaccactattctacacccgcctagcacttttagtcatcctccggtcctaatattaacgctcgacttatatagttattcccttcgtttccactagcgactaaaacgacgccgaaaatagctcccctttagctaaatctaagtccccccccccttttcgctatcagtttataaagatatactatataaccttacacatagatatcactggttatggtgtgaagcaagaactctattagataatagaccaataataattaactatataagaaccacaacttatatacatacgaatctatagttcggctctattactaggaatggtttaacctcccggtaactagaactcgtttcaatacgattcaataattgaaacaaacgaacctccacgtttgcgccgcagttgatgctgtttcttcacatatctatatatcactagtttgccacctgactgctgtctcatcagaagttaaaagttaaatagtatcctgtcatcccatgaaatattgtgacatcctgttcctctgcgccccactgagaaatgttaggctatttgcaatacaacagcaattgtcttttgcactcgggtatctagggaacttccatggttcgctggcccaagatgatttgaacccgaaattgattgcgaatgcacattttccttgccatttgacattgttgttaccttagggaaatggatgataaggtctgaatcgtaggggagtaagcgttgctaaaattgacatcctatgaaattgagtagagaaatacatgtatcatcaatctagtttcaaagcaacaatcaacggatggtgttcggtcttatgaccaaaatctgtgtcaaatcgtgtaaacatagatcaccttcctcgccatttccatctgccctaagctctgccctaacccccaacctacagatcctcgccctcaacccaattgccatgcagtccctgcctcaaccgaagcggcagcaggatgacagcctttgccttggtgaactccctggtatccagcaagtgcaactcgctgcacatagaaatatagttattcaccagagccataacatacccaccgccctcaacggtagatccgcgccgcggaatgaaaattggttcttgcaccatatgtgtctttccagggaagtagatctctgtcactccagtttcaatatccaggtgcgctagagcgttatacagcgggtgtccaccacccagctgaggcatgatggtcgggaaatcggttccgagggcagggttcattaagtcaaagaagcagtgcttgtacggttgggcggcgaagcggtcatcaatgcggtagaactccgagttgtcgctttggagaaccgttgagttcaccaagtcgagctgctcggagttggggttgatagtgaaccgggttagctgggagtggatggaactcggctcaggagagtttccttgcgcatccggccaccaaaagaagacgttcttctcgctcagtccgaggtcgagtacgacattgccggattcgtcttcgtaggcgttggctacatggcccgggaaagagttttggtagcggaaccactgggagaggtgacaaatgatgagatgatggaaggagaaagatagggtgcggggaacataccttgagactggatggctttgctcctcgtcgtggaaggactccaatatagaatggagtttcggggctccactgccagtgctcgccgccctgcttcattctctcaatgtcacagacctgagggatgacggggaaaaggacctaaataacaagggggaacaatatcagaagaggattcgctaaaaatacaagaatcactactcacccagttctccgtgacagcaaaatcgtgaatcatagccacaacaggcgcagtaaaccacacggtttccaagaactttccgtcggctgcaatgcggtaataacagacatcgggtgttccatcgcccttggcttcatatccgaagcagaccatctcccccgtgcgcgggtcgaatttcgggtgtgcggtgaatgtcaaactgggcaactgtccatcgaagtcgtacaggccggttgtctcgagggtgtgaggattcaacgcatatggtggagcgtcttccttcagagccaacaatttgccgttaaagtgaacgacgtttgtgttggctgtggtgcggatctcgaattgcacggcatcggtgaatttgttacggtatttacctacagaaagaaacgagttattagttatatgtgagcttgtcaacggtgagggttagtaccaagcaatgctctttgggcctctcgttcccggacgaacttctctgttcggacaaaacgctgcttgaaggagaccgagccgtctttgattttgaaggcgctgatactgccatcgccattgaaccactgttgtcatgtcagctatcctgctattttgggattgaagattcgtatcaattcgctcactggatcattctcgatgaagggcgagaattggggatcgggcatcacccggtagaatgtcccatcaatgtcttccgggatctcgccatacacctccagattcagaacttctccttccactcggcatggcttcatgaacccggaaaattgcgggcggtttgggaagactttccggggcttttgagaaagaacggacattttggttatctcgaaggcaaggaaagaagatcgtgtgtagtagaaaaatcgtcaagtgtagacaatctcatacaagaatttactttttatttaattatcacagaactatgaagtacaaccttgtgtcatctacacttttgtttcctccccgacggaatagcggggatgctgcttgtatacccccggtatccccggtgggtcattttccacttacacatcccaaggttggaaatataggtgatcatttcaatgtaaaattcatttcgatcgtgccgggtagcttagccccgggtgttccggggcttactgtatattgggagaacacagggtatgaggaattttgagccacctgccaacgctgtattgcatataatctaccaatactccgtatactttcccaatctacgatccacgccgtagatctttcatcttatcaatgaccgtgttcttgctcgtcgaactttcatttctgctcaccgaataaaaccgtggaagctacccataataagctaggatacaagactgctatttatagtatgcaggaacaggctcatcgtcattaaatcccccttccgtacatccaggaagtctgtgtcaattatctgtacacgctagtaatttaacgttttcttttaacaatataataaattactttgtgaaggcctaatgttcatatttggtttattgggttaaaaaactgcgatagacttatatactaatatataaagcctattcttgagcctcaaaaaatatattgaaatgtacatccaggtttcaaccgtaactgtattacagtgcgtaattgacaatttaggcaaatagtttttttttacaagatggggcagtactcaggaatatccccacagcatgtcatacacgcatcaatttgtaggtgcgcgctgtgaagaagcaacggcaaatgaaaaagggggctgttcccccgcttccaggcgaaattccccattgcaaccgaactgtgattggtcagaagtggaccccagatctttcacaagggcaactcccgacatattccgaggtttccttactccgtaattcttctcataattatcccatggcagaccagcgtcctcagtcttcgaccccgggtgattccgacatccgaccgacaaaaacgcagggccggaaacgcaagagagtatctgtggcatgtcggtcctgtcgggtccgcaagtctcgtgtatgttatacgatcgccatatattctagagttgatggctgaatttttcaatatagtgtgatggtgcacgaccgtgttcgacatgcgaagttatggacacggagtgccgatatgagcagccgtacagccagcctgtagcaataactaacggcagcagtgagcggtgagtcaatctgttcaggatgtctacacgatccaaactcatccgtgtaggcaagaggagagtctgctcgagcagcgattacaggcaatagaaaaaaggttgcggctatctgggccagacaaggaattcgatagccctgaaatgcatacagccacctctcccacaattcaggagaaccatgaatcccgacgtagtccgggaatgaaagggccgctggatcaagacgatggagtggatggtatgggcgccgtggcactcaaagatggggctgacgaagaagaatattttggtacagttcaatttatcactgcaaattgttttatgggaccctgtctaacgatttgaaaggcgcttcatctaatgtggccttcttgcgcttcattcatgccgttagccatccggtcaaccccgccgacaatttacctctctcaagcatagatgtttccaccgaagttggccaatcaaacgataaccgcttcgatgcattcctaagaagaccatcgggtatcagcagtctaactgagtctcagggaagagttcgcgtagatcccttcgcgcttccccctcaagtggaagcagacgccttgttgcatttatttttcaccaccgtcaatctgatgattccctgcatctatgaaagctcgttccgagacacttacaggaagttgcagattgacgggattcggagtgttcggagatcctggctggggactctgaatgtcgtgttcgccctcgcgacaaatgtcatgacggcgacttcaccgaatattgaaagggccacgagggccagtatttattttgagcgggcgatggaattggtgaaatcagatattttagggcgtctttcattggaaatgggtatggcacacatttaatggcttgcgttcaactcacactgacgtgcttagtgcaattattccttttgatggaggggtaccttgaaggaactacatcttcatcgcttgcctggacgttacatggcctggctgtgaaaggggcataccaacttggtcttcatattatggactcgaagagcatgtcgcaaaccgatcgggaagtgcgcaggagatcatggtattggtgtgttatgaatgatcggcatgtgtctgtaattccgtatatggcgaagtatactaatgacgatcaggttcctgagcgtgacttacggtcggccccctttgattcccttgacccatgtgagattcgaggccagcccctatataacattcagcaatgtgcccagtggtgttaccgtatccagcctggcttattttgatgctatgatgtaagcaaatttccctcgaaaatttctgcagttttgactaattttgataggtctattgctcacatcatgggcgacgccctggagcgtctctatgaccaaaatctccgggcttcccccccccccnnnnnnnnnnnnnnnnnnnnnnnnnnnnnnnnnnnnnnnnnnnnnnnnnnnnnnnnnnnnnnnnnnnnnnnnnnnnnnnnnnnnnnnnnnnnnnnnnnnnnnnnnnnnnnnnnnnnnnnnnnnnnnnnnnnnnnnnnnnnnnnnnnnntctggggcttcgccctcgtctccccatgagtgaaagcctcaaccagatctccaaactgcgctgggaactagcccagtggcaggataatctcccatcctgtttacaaataatagcctcccaggacacgctggatgatgtccctttgacggtcggaaccacgagactccgcgtcctactttctctccgcttcctcggtgcgagaatacttattctacgcccagtcctcagtcaatttctcgattttccgggtatgacattttcgaacgaacatcagtcggaatggctgcggaattcaagtgcagttttgctagcggatttagtccgcacgtgtggcgatatcctacaaatcagcaaaagtatcttagccggttccaggaatgatcagaatctgcttggggcttggtggttttcttgttattatagtatgcataccctagttcttatgatgtgtttgattagtactaaccacgcgcagctttcaactcctccctcgcggtcttgggaatccttctgataaaaagaatcccggcatactccgggcaattatctacattttccgtaactgaattgcgaagtctgctagagacagctatggaggtcctacgtgggctgaacaagggcagtgaaaccgtcatgcgctgtcgagatactttgatgaggcttatcactgcgtttgattttgatggtaacaatgcctatccatttcttggtaccacatatgactgacaaatcaacgtgccgcaaatgtagccggatttacaccagaatcattctcactatccccatccagcgcgtgggcgtggcaatttgttaacccgggcttgttcagctcggaggcatcgttgagtcttgctccagggacggttgatattgcgtctggctctcagtttccaatatcgacgaatattggagtgcgcccagagcatgacatcttccatctccctggatgagttccaccgtatccacctccagtcgaggaatgactggcggaatcggtccatgttgttagttagagggaaagaggtatctacctgatcggccgaacagttatcgagctggatcgctccgtgttttgggtcagagggcatggaggtatcgaatggcggaatcggcccatgttacggctgagacagcacagtgttttcgaccattccccacaaataatgtggttttcatcagactttatagctgcgtggtatctggtatgatagggcctttttcgcccagttgaagtcccaagggaggtttaccgctgaactcggacctcgtaatgactttcgcggtcgcggtaaggccattgcgaaaccagtcttgccaaagttaaagatatatccctccgcgataccgtatttgccgatgatattacggacgagattaaacgactacctcaggatcatcgcaggctgctcgctggtaatcgtaccctcgcccaacatctatcctcacttagccactattcccctgctcctacttctttgaaaggggaaggatactaacaaaacaacctgccgccaccatttgacgtgaacgtgtgattatgcgtacctaagcaagtttacattgtacaattatcttacttggcatagctatctttagtcaatcaatggctaggcttgacttagcgctttgcctttcccctgggcgttaaacaactcgccctgactggccatagtaccagaggttgtgcgtattctccacttgcggctcgtgtgtgcaggtgattggtttgttgaaccatttgctgatcacttaattatgtagcacgctacctgtttgcagtcctgacaagaacaactttactagatcttcactctgaatatcttagttcacaggaaaatcgaactcgccccaacgaggtgaccatattcccgaatacacgtagctaaacatggatgcacggaatatatatgcattgacttgcgtacattgaacccatagggttgagaacatgttgcaagccagccctgctcttacacacataaagtagcatcacttctcttgcgccttctattatgaggctcatggaacttctgctcgtacttctgtagaacgtccattcgcatgtactgtacgatcggaatttgtggaaagctattcacgcatctatggaacaccttcattccaaatgcccgactttccgggagaaagcaccccattgggatccagcacatccttcaagcgtcctgtaaacttattgaacgcaaagccgttgaagtccaacttggccgcaatctggtccatgtagcgcacatgcgtgcggtactccatatatccctgctccgcaccatcatgcagcaagttcctgcacaactcgaggacgcgtgcctcctctctggacgtgtagatgaccagctcgatgccgactacgtagcgcgggtagacatggaagtcggcgaagaagtcgaacttcgcgtcaatggtgcgttgcttcgctgtcatgtaccactcgtacaactcacgtccggatggagggatgatgggcgagaagtcgacgtgtgcaccgcccttctcggctcggctgtcgacgatgcccagtggggtgagcgttgggatgccactgtgcggaatctcttcttctttgatctctgctgcggtgatggcgcggcctggggatccgggaaactcgcgccattcgatcttcacacctgggatcgtggagaacgcgcgttgcacggtttgaattaacgctgggagcatttcgactgagccatatagcgagaagtaggttttccagaatccccagttatgttccgcacggatttcctcgagtacgctgtaaggtacgtatgagttgggctccatgtacggggccagtttggcgtgaacctcggggactttggatgtaagcgcgatgcggaagatgttggcgatggaaggtgagttgaggatgatggagcgccgcatcaggtctgacaaagtcccggtgagagggatgaggtctgcttccttgggaacgctgacttcaagagtggcgtatgcctcgggggcgggagtgatatgcatgccaatcttggtgacgacacctgtttttgttagtgattgagttgttgaggagatgggagaacgttaagtcttaccgaggttggattggtagaacagaccgtcaagggttgggccaaagcctctgttggatggtaagtcaatatgttattggggtgagagcataggcgagccaatgaactgtgaacataccccttgtatagcgcgaacgttttattatccttcatcgctcccatacccgtccgaagcaattcaccattaggcagcacaacttccatgccgcactgtgactgcgaatgctctccattgggcgtatatccaaagcctcggtccatggtatttcccaaaacagaaccccatccaatggccggcaccgatggccagaggttcaggccctgtcgttggatttcctcgtaaaggtcgaagaaggatacacccggctcgactatcgcgtatccgtactcttcgtttacctcgacgatcgtgttcattcggtgcagatctaggataacgcatcctttgacgacagagctggatccaccatatctatgaccgttagtgatatgcagatggcataggagcgatatacatcatggacgacataccccaggttctttccccgtgacactgtccacaaacacaccttgtgcttatttgcaagcttcacgacctcctggacctcttccacagtactgggtcgagcggcaccgcttggtgtgtggtttcctgaggctgaaaatggatcgccgtaagacttctggccttgagtaccctcgagtgcgccatgactaggggtgcgggaaatgttgtcttctccgagcacacgggcgacgtcgtcaaagaaattgcccaatgcctgggggttgacagttggagatctatggggtgccattgtgtcgctgtctgcaagtggaggactacgatatgtctacagggatctacggaaatacttattatatgcacatccctttatttctggggtcatgatcaacaacagctcctactaatttaccagcagccggggataccgggggaagctcacccgcggtcaatcccccaacaaaccggccgctggtatggacccatgctcgccccgctttgatgtcgaaagtttacccctctcggcgtggtcagatttttcagtattatccaccgacagtctctcaattggttctttcggcagtagtgcgtagggatatcctgtaatttgaaacaaagctggagtattgattgaagaactatttgggagactgctgttgagaggttctatatgcctgaggctagtattggcatgtgacagctcgaggattcccaattgacccgtttaccagatggggtagacgctgaaccagccctgtccttggtatttcaccatctctaagactgacagtttccacatcagaggttacgttggacttttctgactcagtgggaaacgggacctcgggattgagaatcccccgagtttttagggaaaaggccgggaagcaatccctgggtatccgcgtatccgcggccttcgtccgcggatagctggctgaacagccgcttacacatactacggaggattttgtttgtattttgcttcgttctatgagttgataattagacctgagttaatagttagaccccttgttccggtaattactagcgccttgtagagtgactatattagatcggatatccatcaatatacatagaacttgtgtcactatttcttccgtgttttctatgattccccaatcttaccatgtttgtcattgcatacaacatcctctttctcttgattgcgtggattctggggcaatgcatctacaatatctttctccatcctctgcgccacatcccaggcccgcttctcgctaaggtgtctcgctgttggctctttagcttagagattagagggactcagcacttgaaaattcatagcctgcatcgcaaatacggtatgttaaatttgtgtctaccaaatgaatatcgccaacttacttcagaggatcaggaccaataatgaggatatcgccgaatgaagtctcatttgacgacatcgaagcgtcggacatcatttacgcacaaacttccaagttcgaaaagtctgaatattactatcgtgcttttgaggaccaaggccccaatctcttcagcatccgtgatcgtcaacatcattcccaggccaagagactcgtgtcccacgcgttctcccgtgcaaatgtcattcagcacgagtcgtctatatatgataaggccctctacttaatggataggattgagcagcgagcaaaggaacgtcgaacgatccctctgttccccgcattccgttgcatgacgcttgatacaatctctgaattttgctttgggaagtccacgggcgcgctgcatatgaacaacttcgagtcaacgacctttgaggccattgacaaggcaaatggggcggtcctttttgtgagttctgccttcccgtcacgaagcctcaagggcagggtgagggatagaattttgagactgacatttttcagttccaatatttcccattcctccggcatctcatccagtgggcaaacaactacaaaatatgtgccgtccctaatggatttattgagttggcgcagaaagcggaggctggcttgcaagacgtgcattcttctggctcatggaccatgttcaaaaatatgatttccatggcggagaagaagtctacccaactgacgaaggaacagttggtgtctgagggtatgctcatgattgttgcaggcacagataccacagccacatccttgtctgtgacccttcacaatttgctgcaacagcctgagacatataagaaattgcaagatgagatccgcacagccatgcccactatggattccagaccgacaatacaggttctcgatacactgcctttccttgatgcgtgcgtcaaggaagggttgcggctcgcttgtcctagtcacactcgccttccacgcactgtcccatcagatggctggtatttcaagaaacattacttcccatatggagtaagctctaattcaactatttacgtccactggaagccactgaccttctgtagaccaatgtgagcacatctcccctgtattatctgcacagcgacaatgtgtttcactcccccaagaaatacaacccgtttcgatggttggtcgatgacgaaaagaggcgacatctgctggcaaactttcatccattctcacggggaactcgacaatgcattggacaaaagtaagtcttccatcgcataccatctcaaatcttcacattgctgaacaaataatctatagtctgtcaagcattgaacagaaaatcgtcctatcgctatttattagacgtttcaaccccggaacagtcttaaagaagaaagtcagcctgatagaggcggtgaccgcagttcctgacgatcctttggaagttcttgtgaatcttatctttgagtgatcgtacctcttctctcgcatatattgatgtttctactgctggtggcctgtatgtacttggaatgagaacttaggctttgaaggccgaagatatttgatggaagtgatctcaaacaggcaaaagtcgtaaaatggaatatacatgctttggagcgaagaagtccctacgtagtgcatatcgccctaaattccatagtcgctatctctccataaccgctaagaaccagagccccactctgctaattggaagtatgtacccggcttctcggaagccgcggaagggcctgaagtggaaacttagactatttaccttttggtcaagatatcccggggaagcctcgggatccccatactgctaagcggaagtcctgctcgagggaataaattacactgtggaggctagggatgattcggtgtcccagtcatctacaactgacacctcgggcatacgttacctgtcggagtcaggggtttaacaacctcttccgatgcgacatattctcagctagattgacaaagtggtgaattgttaacttctcccatgcttcctgtgcatctacgaactctccccatgtatcctcattattacgcatatcgcggagccagggccgtagctttaatatatcggcctttaacaacgagaggttctcaattaggtttaaatcaggtgaatagggaggccaatctattacatttagattcatctcacgtagaaggccctgaataatatacgcggtgtgcgtaggtgcgttatcatactgaaaaataactgggcacggaagcgtcggcttgatatatggtatgtacatgatagacataatgcgaaattatgaaggaatcccccacagatttctgcttccccgcacgcattgtacttggctctatgtggggaattgagctccagtcgggttattgcgaatcattccgacgtattcccgggttcgagtatataagaatatcgagtagctcacatacgttgatccaatttacgaatgctttttatctaagatgtcaacagtggttgaaattctgggaaatatctcctctgcggattggctatctgcatctctcgcatgtgtgagacttaagacatgattatttcttatcctttataatgcttacttttcatctctcacagattttgctacatatcatctataatgtgtggtttggcccattagcacatattccaggcccttttctcgcgaaagtgtcctcattatggattgttttccaatgtcgttacacaagacgatccgaaactcttctcaaacagcaccaaaagtatgggaattttgtccgggtagcaccgaatcatatttctatatccgatccgtccgccttagaagcaatctacgggcacaaatctgggttcaacaaaggccccttttatgaagataagtccagtaagactcaatttcaccatcccaactaacatttacagactattttaccctttcaccaagttgagcctgtacttttcaataccagggatgtgcagatacatcatcgaaagcgcaaatatttgagcccggcattctcggcaaagaatttgaacgaatacgagccttatatggcgatgcaaatacggaaactgatggaatgcttccaccgtcgcattgaaaactctggaacggtccaactggatttcaatgagtactgtgagtggcccaaagctgtttagatcaattatggaagactaatttctacgagcaaactacttggcattcgacgtgataggttaggccccccacaggtccattatcattattatttcgctgacgggacgtgtgcaggggattatgcatttggaaagccgttcgggtttcttgataaagagcgagatcacctcaacctgatagccattattgatgcacgcggcgaggttctcaacgcattgggtcatctcccacaaatcctccgaccgatcatgaaatattttttcctggatccattctggccaaatgggctacgcgcgacgtccaacttggcagcaatcggtacacaggcctattatggacggaaggatcagaaaaattctcggcatgacctccttagcttcttatttaaagcaaaagacccagagtctgggggtccattatccgagaaggagatcattgccgagtctatctcatttattgttggcggtagtgatactacaagctcgaccatgactaatgtggttgatattgtttctcggtccccggaagtacaaagacaattacaatcagagctggatcaggcatttcctggagtgatggaaagtgactgggtggccgattttcagactgcgaacaggctccctgtgttgaatgctgtgctgcgggaaacgatgcgattcaaaccaaccagtgccacgggactagagcgggtgacacctgccggaggcaagattattgccggcatgtttatcccagaaggggtgagtttggtttacctacacctactttctattgccacaatattggagaagctaaccagtaacgcagactttggtgagtgtgccgacgttgaatgttcatcataacccagctgtctttgtggtaagtgatcccatatcttctgaaagcaaaacctgaccggagattaagcgccccgacgaatatgacatatcacggtggctgggcagcgactcttcggcgttgcttgactccttctatccgttttctcttggaccacgagcctgtattggaagaaagtaggttataattccgtgttttgtttgtagccaaccagaggccccagcactaactttctgaaagcttcgcatggatggagatgctgaagaccttggccacagttttcaaattattcattgttgaaagaaccagaacgcttggcacggaagttcgcgagggtttctttgtcaagaacagtgaatgtaatgtggtggtcaagccgaggtttggacggaaagatagaacatgaggctacatctagagagttgtgaaaaacagatcagattgaataaacgagctgagcggaagtgcaagatggtattacggacatgctagtcaccaaaatattagttgtgtggacagcaactatgatgggccccagttgatgggcccagcttctcatgtgcaatacctaatacccagattaggcctcgccaaaacccgcccaaaaccccaacccgcctgttggttgataagtgatgcttcggtgttcatattattgataaacacccccccccccccccccccccccccccccccgccccccgcggggggatctgctattataccgcgttgatttgttatattggaatctagatgtgactagcactactccgtatcccgtatccatttccctccgtattccgtcctcccggacaatgtagctcttctccagactttcatctccgcatcttgtcgatgtctatcaaaaccgctcccgccacccgaaccagtcagatttccgtgtactgactggcgatagccctaactagcgcccaatcagcggtcaggccttgtaacgaaactctatgaaatgcaataatctgagcaatcgttcttctcccgttggaccgataagatatatagaggcaccgattacaggggtgatgttgtggaaagccgaatctagcgcatggcatttccaagatatggtgttcttatcctacggcgttctctccgaagaaccatcccacgtcttatccgggtcttcaaccccctcagatacacatcctgccctccaatgtaaacgtttccagatccatgcgcaacagatagtcggtgatacgttggtcatgattcttagcaaccgacgccagggcccttggaccgagcacatatcagctgcgagtcccgcaaatacatggggcaagtatacacaccgaggactcaaaaaaaagcaacctgaattctagatggactcctttctcttcaaagtggaatatattatctgtattttgcaatttttatcacgcgcgcgctgcgagaatggctatcgaaatattgtagtatacggctaagtactccacggttcctgatctcccctcggagctatcaccaaatgacgatcgcgcgattcgttatcgcggccatgtcagatgactggcccgtacagatatactcaagtaaagttgtaacttttatacgcgctcttcgtcggcctttgcatatctcgttcctgcaggacgtacccgctcagtaccatctggactttatcacgcgagtcggaccggtatagagtacatccactatacctctgtaatacaagactaaccccatcgactggagaagccagccacgccgcaacttgggatcgatcaagtcatagtcgggccagtggggtggaccgtggcgaaaggttctcgaaaccccccggcgtgaccaataagaccctttctgctagggccaccccgacaccggccatggataagagaatcaaggcagtattacaggtcaacagggcatttcggttattcatatgtgtgattacaattatgtactgtaagagtcacgagtccgagggtgatttttgggttgtggtctcttaggtaaacgcactgaagtttatattccaatatggatacacaaagggtatgcaactcgggggatttaggtcagggattctccaatgatttcaggccaaaagtcatatgacacctggcactattattttctgccagccaaatctgtatatttgaattttgatttacagaatacacaatgctgcacttaatgcttgtattgaaacaggtggctacggaggatgttgtatacagcgaaaggtcgacaggcgcgaaacaagaaatatcccgacagcatagcctctctcattcgcgcctcctcggttttacagaccgagagctggccttgtggcgtaatttggttgaatagtggacttgaagggatgacatatttcggcctgggtagtgagccgtaatctcagaccatgacattgcctctttttccttcagccgcaccagtagcgcattctcgtatgacgtgtacggtcttagtttccctggaataaccgccgtgtggggtcgagacagcatcgggctagggtcgggtacgaaagtaaagaaatatgccgatttcagaccagaatgagattcgaccgtgaggagagcactcccgcgtacatcctggaaagcaccagagtgatgagatgaaacgggatcggaagagtccgaagggtcggaaagtggcctggttgaaggtctccgtttcttcctcttttgacatagctgttctttattataggtggtgttcccatcttggtggttgctggtgcctcgacctaagcggagtcgcttcttgtatactgccgtagcggcccttttgcttcttctggcggctccttgcttccggaacggtgatggtacaaccacggctatcgacggatagcgcaccgggacattggaactcagtgtcgttcaaacacgagaacatcctggaggagagcgcacggtcggcgatgcggacaggccagatgtggctgaggtgtcttcagcagtgctggaatcttcagcccaccccggagcctcgtttgccctagagcatgggttttcacctaggtaagatgtctgactcggctccgtataatttttgtagcccccagggtatagactgtatgagggctccgtgtagataacttccgcttggctgattcttgttgggaatcacccgccacagataggttgctagaggcacagttcgcttgttcgggtgcaggcatgggtgcggtcacacaaggtacgcacgagagttgagaagtctccatttctttggtatcatgaacagtgtctaaaaaaagcggaaaaaaagtcagacaatgagaggatgatggcttacttcattatcatgtgttttgccaacatacccggtaaatcatctccccgcatatcagaaggaatggggtctagatgacctggcactgcaggagatgggattgttctcgcggagtctgtcaatggcactggctctgagaaagccagcgcggaaattccacgatctaacgaaatatcacgggtagctggcatatttgttgtcactccgggttcgacatctttcgtcatttcaggccgagtaggaccatagacatgattgatctcgaagtcaaatatgttccagtcatgagttgtaccggccggtggcgttgactgtcctagtgatacctcgcacggtcctggacggaagccgaacccagtgggaaaagactgctggaagtatcgtggcacatgagctggagcggggggcacgctttttgcactagtgcaaggcggcgggcgacttgggccatggtagaagtcgatttgatcaaggtccaccctcatttcccagaaagtggtaagacatagcggaggtagataccgacagataataaagcaataacctcgaataagagtgcagcggtaactgggctggtgtatccacgtccgctctgaatcatatccaaaaaatgaaaaggaggtcagtcagcctttttaatacccgggcgccgccagagcattactagctgggaatcatgcagtatatcgccttgcagaccccacacaaccgagaaccgcgacaacactgccttgttgatactactccctgcttgcgtcgggcgattacttgagagtactccgggcgaatttagccaacctgcctcgtcgaagggcgtgttgggtccgtagtacccaccgtgtggcgttgcagccttcaagacacctcagctgacaactgatggattgggaagagattggcaagaaaaaattcctcaatcccagcggcagcctacacttcgccgatcacgcaagccgatcatgcaagccatcaatttcatggatggttgtgatgcctcagctcagcgccagagctccttgaggcatttttgcggttggctagtgagcgaaagcgggtctaatgagcgactcaccgatgatcctcaaccggaagtcggctgaaagagcaaaggtgaccgtttggtggcgcgcggcgtggcattcgcgaaccgaagcctgagacaaagagcggccagtagtcctcgtacattgctcttcacatgtccatttatcaggcagcccgagggtgagatgcacaccggttaagacagcgaccctccgtagcgtacagtataaaacgaggagtgtatagagccatatagaactgggaaatcaagggcgaccccggtgacttgcagggtcagaccgacgactccttcaaatttccgcgagtggggaagcaggctgtgctcggggcgcagagtttttagctggcaggggccacgtcagtagaccagaaaatggcgccggcgaaacataatggagggggaaaggggagaatcggcgtaggaaagaagagagctgtcgttgagcgacgcaccgcgggttatatagatggcggacgtcgcgagacgggcggtgcgagacggcagaacccgaccggggctagggtgaggcgccaaacccgttacggacgggctaaaccataaatggacggacgcgatactggatcgggcgtgggtcccacgggcgctaaaccccaaggaggggggcgccgaaacgggcggcgggccagcaaatcgcaattctactcaataacaaacccgagcgtccttcaccgccaagcgcatcacgtgaccgtgactccagatctactcccagggagtatacccgggggtcaccagcgactccaagcagtgactccagggagtcactcaagggagtaggaacgaaagatatataaggacactccctcatgtacttagtttagttcttcgtcttcaatcacacattgttacttgtgtttaccttttggattactgtgactctttaacttgattataacttgacaacactcacgagcagaccaataccccggtatagatctactcggcgctctacctggcatcagttcctcgattgctcaacaggacttaggctacagtaaggccctgcgcggcaatagctcagttgcgaccgatcgttgacgttggatactagacctcgccaaaaacatttagagggcgagcatcgcccgccctccgcccgacccgcgagggcagagggcaggtaagagcccgccctcgcccggcccccc

SEQ ID NO: 116 - DNA, 60440 bp, Penicillium roqueforti
  misc_feature (49442)..(49753): n is a, c, g, or t
ggactccccaaacagctcgccagaccaggaaaagcaaggaaaacagcagcccaatgaattgccaatccataatgataaggaccataaactggaatcttcagatcatgtccctccattggtaagtaaaatccgtcagcttcgaattctttggctgaccatcgtagccctccccttcgcaacacgaagaagcaacaagacataccttggcgaccgagccgtttcaacccacgttgaaggtgctagcagacctcgaacgcaacgatcccaagtttgcctttccagctgctcgacttgttggactctaccgacgcctatgggagtcatgcgtttccaagcacatcgatgtccaaaagattgaccagagcaatgggatcttgaaggagggacggaaagctggagactgagcattttttattcctctcttatgaggacaaactaggggaatttataaccacatgctacagtaagttatcgaatgcgttgaatgtatcaacagcgtgcaccgttggcacccgtcaccaacacaacgaaagttcaccggcagtataagccttatctctccttagggaagacagaaatagatagcggaaaaacaagtgtcattattcccccccatagacgctctaccacatggacactttaccaaggctcaggctcatcgacagggtaggcttgaagatcgctcgctttaaaggctgaaacaacatcattacaaagagcctgaaccgctcgcttgcgctccgacaatactgaagcttgtatattgcagagctgtagaaggatatcgctatcgcttgctaacaagtcatttgacgcttgaagctgtcgctgctcctcctcgagtcgtattttctgggccgatttgacgacgtagcattcctataagtaaaagtacaagtcgagcaatttgagggctggtgtagcgagggagtcattgaggcttactacttttatgaactccgctataagggtacctcgtgttctcactggaacctattcagtattagtgggttttttttatttccttcctagagggggattgacctaccttaggtttaatagttgtgccgtttgaagcttattgtggttggttttccaacttgggtttatcttctggagcgtgagatactcggcactgtctcttggctggccgattaatgggggaaggcgaagtgggatggtccattttggtgaattggatcagaaattatgctcgaggggcatttatagctgataattcatgtgaggctactgttatttctactagtgcttccttacctagggtcgactgcaattttaaagctagtgaacagttagcttaaccgctgacgctcgatctcaccacctgctgagagcaaactgcttaggaataagcgggattaaatcgcatctatagtattgacacaaactaatacaaagtctatcttataatggtagtctataagtgtacttccgatgtatggatgctataaattactttcaaatcattgaagctttgctgtgactacaaactattcgaagtgcggaagtaaagataatttgattcccaatcttgatgttaataggcgctgggaacagctatctcgcaccacatcactagagctacctgaaatagatgtcgctagcccttacaaacgattaaatattctcctcggagaccgttttaacaattttttagtcgtgttgttgttataaattctgctctggatggccctctggatgcgatagtcctttactagatctagggatctcctcaaactgaagtgtatcagtctgggattggccacaagtgcatcaataatcgagaaatgtccacccctgaccgctaacatcaatggatcctcgaaccattgattccttaggttgatatcaattcggctatggcgtagtatttcccggactatctctaggtcaccgccacgggcagtaatgcagagagcagtgtcataggttgcgacagtgcttttattaacatttagacgtgcgccttgctgtactaagagccttaccacatcgagatgactatgtgaaaccgctcgataaatgggcggatctattaaaccccttctattgatctctacgccctctatactcagtaaacaagcaactgtcttcacgtgtccgtgatatacagcaacggaaattggagagtggcctgcaatgcagagattcagagcaatccctggcactgtaagcagccgttgtagaagtatagtatctaatcttattgcggtatggtgtaaagatgtagacggggactcaagtctcccacggcctctaacgaaattaatgtcgatgtctttctccgccaagagcctttcggttatctcgtcgtatgacgagtaagtagatagccaaagtggtgtattactatctttgtctttgcagttcacgttggcaagggggtggcccaggatcaaattgactatttctaagcgtttggtttgaacggcgagatggggtggcgtatagccattccggttctggatgttcgaattcaggcccttttgcctgagaagtcttttgacagcctctactgacctataggccactgcttggtgaataggtagctcagcctcttgtgatgatttggtactaagaaacactttggtcatcggatcgtttgaaaaaatcatttctatcacgggtctattgaaacgacatgcccaagaccacgccgactggcctgaatcatcttccaagttagggtcgctgctacttaaaagtagcagttgcacgaatcctattcttcctgcgaagactgctaggtgaagcgccgttcgcccgtatttgtgtttaatgtccacactggcggcgcggtgctctagcacgctcttgacgatggagaaacccccgtagtggatagcatatgacagggggctgtcgcgcgcttgattttggatgttgatatctagatctcgatggctgagcagcagttcacgcacagcagcggaagtgtatttcaacgcccgcatcaaaggagttttgcctcggtaaaatgcattgatgttggcgttatgccggagcaaagcctccccaagaccaacgttgtcgtatttgacggccaggtgcagcaggttgctgttctgaaatttgatattgtatctccagatgctgggctgcagtttaaaatcgaagtctttgcatgatttttcgagggtaaataatgcactgccgtccaaatgtgacacaatccacaacaaaagctcgttgggcagctctgtaaggttttgctgcaatgtattagctcatcggtaaaatcagcaagaaatcaaaacagaccatgaccggataggattggagctaggaagcaaatgaaatgtaaatgtggctgaggtctgaaagttggacgccttagatatctccctcagctaaattctgtggtcagctagaagtgtagcccgtcactccgctgaggcgcgtagcaaccacacggcagcatcaaagccttgacaagaatgtttgggcggcgttgaaggatctctggcgtctagctcccgggaacgccaaatcagttcctggttatgccgatagcctggagaccgaatctaccttggtacccacttctcacatctagcgccataagagtaaatcatagcacataacgcgcatcaaagttccataggcaacccagaatttcacccagcatttgtcgactttgcggctaaccgcagtagatagtctgttcgccaatacatggccatcgcgatggacagtcacaagtgcagctgattgcagcagtggtctggaatgatatcccttctcgcaggccactgattggccgtatagtggcgcatactgcgtgcgaatgcattctcggacgtaccgactgtttcaaggaagtgttccatgccagccacgtagccatataggtaaggagccacggcgatggcatataaagctggcgagggaacgctgcaagatagtccaacaccaattcccatccgaagcattttctgcctttgtccaccacctcaatgtccgccatgctgccttggaattcgcttcttgtttgtgagatggaagtcagccccaatggtggtcctggcttctgttgcaggatgacgaaaaaaaggggctccaaccaaaaactcggtcaaacgtgaagacaccaagataggccataaaaagctgaacactgtggccagagagctgtttgacctgtcaaacttgcaatcgaagctctgtgcttttgtcaaagaatctctctgtgcaaggtggcataggcaacgacaggccgatggggttggccagcagtggtatgaagcagctgtccgcaaccaggcgcgagtgtcacatgactctagagttgcatctccatccattgtgcatccgagccagcgtcagacatcgccagcctccaggcgacgccctgcatcagacaacactgaccggtcaccacctcacgggctcacacaagacccgccggggcccgtctcaaccagctccgagctggtgcaatcaatcaatcccgctgtcactgccgaaatgctgcggaccaacggtgttccatggcacgtttcgccagctcgaccagctatcctgacgtctgtcactaatatctgggcgggtgtccaagacttgacgctccagagtctcagcttgagtgaagagctcgaaaaagatccactgtgtgttttgtttggccgaggacgaggaacaagcaaacgaatgcgtgatcctgtgttgcgatcagtgccgagcgcatgcccatccatcctgcgtggaagagtggttggaaaagcgacgtacaagctttggcacgtcatgctgtgtgtggtaagtatagatggtttcaattccgtaatgctgggatgctgatgaatgctgtcgaaacgaaggaactctagacgcattgattcgtccactccgagtcctcttggcagataccgaaacaaactctgtccactcggcaagcgaatcatcaaccgatagcgagcctgtcagcgtcaggagtccagcacgaaacgacccgagtcagagtcaatcgcgtcgggggtcagtggaatccctaggggtatcaatcgagcagagtgggccccgtcgctcagccagactagcaggggctcacctaccgcgagattcttctacctctgcattgcttcgccggtcggcacgactgaattccaatcagcgtaggtgattacaatttacagcaaacgcgcgacggaaatgggaaattagcgaagcggctgtcaatcacacgtgactccatatcctggtgatatggagttttggagcaaccaaataaattaaatcctgatcgttagaccccatagagcactacgcgaccgtttcatgtttgcaagtgctagatgtcaatgcacctttaatgctattcgaagtttgcttcatttcagatacgttttagctcgaaaaccgagcgccggtagataaaagcgcacatacctaacggcggcggctaaagtaaatgccgacagcgagttcagctgagccttgtggagcgcgaagacggacgttgttggcagaaaacacagctcgcgcgtcggcaggagagcctcgacaattctatccatactgtctcgcgacgtattagaaccagctcatctatttaatcgacaaacattgttaatctgactttcggaatcaacagattgatcctggaaacgccaagagatattatagaagctgtttattccctggaaactcctctttagctcctggggtcacttcctgtttctaggaatttgaggtctacccctgggaatccacactacgatcctgactggttacaaactggctctgggaatacaatagctagatctggaagctgccgtgctcctggggccctacttttggatcctggactcattattctgctttctgaggtggcggaaagccctcacaagatacccttaccagacctgcgcacaaatatgagtcattcaacgactcctggaaaggcaagctatagccccaggaaccgcacctgaggttccaggagttgataagactgtctacaggaatgactttggttcctcgaggtggaggtacaagaccccagaagctattttgggcttcctgggggctacttggctcctggaagcggcttctttgcccccagaaaccacactgaagcccctgggagcaaggtagctcccagggcccagccatcatttccagggctgatagagcttgatcctggaaacctcaaaagcatttataggagctgtgtatcctaggaaactaatctactcctgggatcttcactctacgttgtgacggttcgtgggtgcttgggttttaccactacgccatctggccaaaaaggcacaatgtttggtcagcgaccaaacacccaagctactatatatgcttgatctctgacatacgttcctgaatgaacacgaaattggtttggggaacgcattgcctggatctgggcgcttttgcactccgagggccgtatctctgaatcctggagtcaatcttctgcctcccagagtacggtactaacttatctccagacctacgcacaaatctgagtcactttattattcccagatgtctagcctatggttttaggaaccggactcaaggctccaggaattaataagctatcaacagggatagcttattaattctccgaggtacaggtaaaagccccagaaactacgtcgggcttcccggggcctacgtggctcctagaagccgcttgtatgcccccataaaccgcactaaagtatccggcagcaagataactcctagggctaggatgtgagttcctatcactgatagagctgttcataggaacgtgactaaattgctaaaagtaaagatggatagttctataagttacgtacaatttcctctagctatgtgattcctggactactgacatgtcccagggtcagtttttgaagtctttacgaacaccaagattgatggatatttacacagaagatcgtcaaccatcacttatcctatatatcgagccactcagaacacggctccaatatcggccaatatcgaccggctagtccgatcaagcgatgaatatgctttgattccaatcaggaaatccaatatgtaaatcatctccgcaactctgcagtaaagcccctcctttaattgaacctatccgtcgcacctctctaatgtttatagactccacctccctcattcttcgaaaaccatcataaaattctgcgattgttcttattcgtaatacctgctgtctcgtttttcacagccctactctagtaggcagttggaaccgccactttgactgtgttataggctcagtacgcgttctctgctagtgaccaagtaagtcacgtacgacaaaacgcacaaagacacaatgaccactaaagatccgaaagcggcctggccaacagatccataatacataatattataatatggaatgtggtcctcgctgccaaaaaattcgaaggatatctgaaagccgtggacgcggctggcaatccaaccccctaaggagagcacgatcatgctcacgatgatttaaatgcaaccgtagtaaaaccgagcggcgcagttctcttatagccacttcgggtagatcacaaggattaacccgaagatagaaaacagggctgaaaccagggccgcaatcaccatgccgtcgacgacgttgtccataagattttggaatgtgatgtccaatatagagtcggtcggggtgacgaggtcggattttacacagtctcgcaggacgaccgcaaagtgtacaatggccgaactgagactagcaagggccagccaagtgatagtaagggaaataatgacaagacgcattcgtatcatggcggcggcagtcctcggagacattttgtgtccgcaagggcagatttagtaggcatgaaaaggtgaggcaggtgtcgctcaagggaacagttgagcaaagtaaagattaggacgcagaaggataaagcaggtcattatccccgggtactgtaaggttatatgtgctaggtaatcttcacgcaaatgctgcctctacaaagggatgacccagctgatactgagcggcgccgtataccatttaattaggtgtcttagtagcattccacggagcttttactagataagtatatttcaaattgaagcactattcctatgctcaaggccgatggcctctaaagaagtgtccggtctcttagtacggatccccggaaatcacccgtttgttcccaggatttactttcctgctactatattattatcctccttaatatgtgtcgtggttgcgcatatcacttctcaagtttggacgaacaccgacggaagatttctgataccgacgtagtttgccttggtctatttgcgatacattgtacttaaggaaactactgttgattgaaaacctacccaacagcccccagaaagatgtagtcaactcttttctatatcttttgttaagcttgcatttaacagccagtttctaagccatgacaaaaccgtcactgttaggtgaactaacgcggccgattaggaaacgagtttcaagtggcaaatttaacaaagtcccactattagcaaggaaaccaacatggctcagatggatatcttctataggcggaaaacaacatgctactggtgttcaatagtattttatgttcaacgttgatatcaacgttgattcaactttctgacaccattcactacccttatatcgcgaaaggtactggaataagaacactcaaaagatactatcatatcggcacaataccagcggattataatcaaagaacctatagcgttcagtgctcctggaagcacaaaacagacttttggccagtcggatccattatcgtggctgcgcagcgcggctgaatcatggccctctagcaacccccaaggcgtcagagatacaattcccttccacacattcctattcatggccaaatataacctatttaggaattgacaactctctccctcttcaattgcatcactatactgtagtcccatcagatggcaaagaagaaacaataatgtgggtgaatgatgctttcatggagatttactcgcatttatgactctaccgagcgacgccgtatttcgtgaacaaggggtcaccaagcagtcggtccaagcagctttcttccacaccgaccagaatctccatgccaccattcggcaaaactgggagcacaacttgacagccgttgatgcagccaacatggggcactcgtacagcctcaatattgttgcccagcagtggtccccattccaacctgtacagtttgaagttcacccatgaggttaacacgcagttgaagccggggacatctagaaaagcggttggtaccagccgatcgacgtcttcaagttgctctaccagagttatcacatcatccgtgaactgctcatcggcccgcagaattgccttgcggatttccgtcgccagatcggctaaagtcatggtgctgagcattttgcggatcggcaccgagacggacacatactctaggaaacaccctaaagtcgatggatgcaacttgggatctgtacgctgccgcccgtcaatagcaatattgaaaacagacacagggtcaccctccagagtgtctaggggcgactgtactgccatgactgtacgccagagtagcgccgcgagagcatcattggtcgatatccatttttgatcggtcggcttggtcgcattcgctggggacgcctctgccttcagctttgctaaagactccggggaaaaatagaaaatctgaccgcaatggctcagagaagacatctttggcgggggtcccgggggtgtaaaaggaagaagagtatactctggatgattttcgagctttccagcattatggccggtcggctttgtcacttgttcgcggtcttgccagatggcctctggaaggtggatgggatttaggatctctagtccctgtgcctggcgacactcttctgcccatatgtttgtccaagtataaaatgtggtaccgtcacccgccatgtggagtatgcaccacgtcaagatcaacccccctcggatgaaattggcctgtacaactgaaatcggcagtcgctccccagcggcaggccaaacagaacggggacagaacgtatcggcatcgaaggaggagacagggaaggatttatctttcaactccgcataatcagatcgaaaggactcacgtaggtccttgaccacaatgcgcgctacctcatggttctccagtttccgaaatctcatcacacccttttgtttcgaactgccatcgggaacggcttcgcacgcgacctctgggattcgttgtgtgagagcttggtacccggctttaagaactcgaatagcttcatccaagtcatactcctcctgaaggtgaaaggggaagatgtaacgaagatagcctttagggccgatacgttccaaaactgtgagctcaggaatcggttggttattcacagaacccatgttgtatttgggttagggtacccgggaaatgaaaagagaagtagtggtagacgggatgaaaagtacagagtatacgcactggaatacggggggtttatcattggcaaatttctaagtcacttggacatttgtacccttcgaattattttctactgcctaggctcagtggccattgtggtgagatagggatctcccgtttcaagacccattgaaggatgatgcttgactagggccatgcgagacgggacatcgcaatttcattaaattatagtgcgagtggcgacatatggattatacagggatatcaaaccgaggtattgattactaagatcacttacagcttaccattggtaaatcgctagataataccccgtatggagtagtgtgcaggctttggcctagccctaacggcccgaacaacgctgatactagctttcttttaggcgggatcggcgcttctccgacggcgatcgccctgaaattagcctgtataccaagaatgtctggtgcaacatctttatgtggttaaatgttcatctgcaaaagtacataattccaggagccatcagatttgattgctagagtgaatccatcattataggaactatctcattcgctccgcagattaatagctgatcctgctgtgtgcctcagttcgatgctgcgatatttctcccattaagtacgcatagtttgctatgaatgaggacccggccattgtcgctctctttgggccagccccgttgaatatcgacctcactgccagtgaggtatctgttaacaatggtgtggtcattgcaatgctgtgtctggctgctttgttggtgattctacgcttcactgctcgaattgtcctccaaaatgccttgatggcggatgactgggcaattattgcggcactagtgagttaatccttcgccagtttggatcacctttgttgactgtattggatcgaaggtttgtataggtgtctcagctggaataagtgtcgccggtgagtactaaacccccagcaaaagaccattgtttaacagagcaacgttgtacataggcggcactactggtgcaggaaaacatatatgggccgtcaagctggaagaattagtggacttgtacagagtaagaaaatgcccttcaaaagagcgcttgacttttctaacccagctttatttagcttttattctcttacacgttcatttatgcctcgtcctgtacttgcaccagactctccattcttttcttttatgcgcgaatctttttccctttggaatcctcgttgaaagcggctctcattgtcggattggtactcacactctcatatcctatcattatttgggtaactatgggcaatgcttgcaaaccagtgtcccacttttggacacaattcagcggcgctgaaggaaaatgcatcaatatcaaccaattctttctcgcactagggattctcaacatgctaaatgatctcattattctgatcatcccttttccgcgaatagctcggctacaaatgacccttcggaagaaattagcaatttgtggcatcatggccgtgggaatcttgtatggcctctttgcttttctttttaagcctcattccgtgaacagagctgaaccatttatcctagtgtttttgttgcgagcatcgtgcgaatccattatctctctgaattcatgggcgccgtggacgtgacatggctgatgggacccgtattcatctggtcaaccatcgagccatcggtcgcggtggtttgtgcctgtctgcctcaccttgcaccgcttgctcgactcgtccatcgatcaatcttatcaagtttgaattcacaaagatgcactattattccagaaagaccaggactccacagtggttcgggggagggtctccagagggggaatcaaaccagcaaccggggaccaacatttgactacgggttcgatcaaatgaagaggaacgcaaaagacgatgaaatgggactaactaactatatcaccgccggtcaaaatgaggccatgaatccttcgaatgactccatatccgaggatattggtcataatcactcaattgctgttcattcaagtcttgtgcaatcggcctcgctaaggccgccctggtagggtgatactatatggaatcaagtccctactgcattagacttggagaacacaataccattccatcacccgctttcataggaggagatgaatacctaacatcgagctaccggtttccttcatatcatgtacatatcgtcagaaaagaatataggcaatgttgtcttatttcaacacactttaatcactggaactcgcttgttggccgcaatcctaaaccattcttctcgtacgccatgccaattatcttcatctgattctatgaatccttacccgtaacccaatattgtgtagaacaccccttaacacgattgataaattcttcaagttggtaccgatatgacatcccccagtccttaccggggagattcgcaaattcaccccctgcctccttgtaactgtaagccttatgtgccttggactcggtctaagtcttgaccggtatgctatcactcttgttacgaataacgaaggtatccttgatatcgatacggtgctagatgaaagtatggataaaaccgtgtagcgttaccgcccgtgtgcgtagcttctcttgcgacttcggggtggacttgtcatcgacgacgacttacttgtgtgtgacgcgggcctcggacagtttctataggataggcccacgtatggtggtggaagcttcggcaatactgccattcgggaagcgaaatttggctttaaagttagtatcacactggttatggatgctgtcaccgaagatgccaggttcgcaggttagacactcctcgggttctatattaaagattatgctgataacgccgaaattgtatgtgcctattatcatcatgctcccgccggcgagtttgtagttgaacccgatgttgtccttttcgagcattaaccatggaaccataaagtctgtatggaagtggacgatatcagcgggggtgatgaaggaccggaacttgtgcactgtaggatggaacgggttgtggaaagcctcgagcaacacgggggacatttggccgttatagcttgggtaaattgaagagaatctcagcctcaatggctttggagagacggcttttctaaaaggacatgcttgacggcacgaatggtgcgtatggcctattcgaagtgtaaactgttgggtaaaggaatcaagactgcatcgatcttcgggtcgtccaggatttctgtttatagtgagacggggctctctagtaagcctctaagtctaacgcaccctcgtaggatgtgcgaacgccggggatgttctgcttttagagaatgccgaagcacaggcatgatctctagccgcaatcgcttgcacgataacctcggaatgtgagagggctggtgtgatcaaggcgagaggtctatcagaaatcaggttcagcgaggcgaccacttcggggcatatggaactcacgcaatctgggccgcccccaggatgccaaaacggatagcatcgttcttcttctcgacctttggagggccgaatgccgtgaaaactcgcataatcattgctgccattgtatttaatttcccttgcttggaatttcccagagacaaacaatacaatttaatcccaaagtgggaatggtagttgtaccgtcggggtgaagattggaccgactaacagggtataggaaaggggacgacagggcatagagtggctaatacgtctcgatagttgggttcatcacaacctatcgctcgaaacatgcggaccattgaatttgccatagacggcgctattgacggcggtatcgcacgacaatataaagaaaaataaacctcctcacagcgccgagatcatgtggtggggattggataaaataccacgaatagatacacttggaatcataacggattactatcgatgtatgcttccagcccacgaggctggatggacctgaccgtcaattagatcgcacaggcttaactaaaatcacacagagcccgatgacgtttgttcatctggaattagtggatctgacggcagctcaggttctttgtttggagacagcttcctcgttacagacgagcctacacttctatcgctgacttttaacagatatgtttcttatgtctacgagctgaacaatctgactaaagaaaggcttccgaggtaagtaattgtttgttgaaacttagagcacaatcccactaactatccatgatcctccctgagtgccgaaacataaagccccaagttgtgcgataaataatctttcggccgatagtacatatggagactcatcgacacaacgagataggcagtgatttgcaaaatagaaatagatggttaatctcaaccgtagctgtctgctatgatttaatcgcctattgtctcggccgggtcacgcttctttctcgaacatcaatagaaagtaccttgaatcattgtgcttcatgtccagctttaatggggctaatacagtgcgtctggtttcttttgaattagttaagctctattctatttagtaattccctattccgtatttcataaaataacggaaaatcaagccaaacaaaataatttcctccaccaaagaatgaaaatatcgcgccccctttggagttcatcctgttcacaaccaagagacatggccacggattccgaaactagaaacggtcgacgtaggtgatagaaggtcattcggcaaagagggcagctggcgtcatgtgtacatatccacttgtcgatgcaaggtttgtgaaataggtgctggcatggcaattggcgaaagatcgatcgagagctcatatccccgagacaaatggtacatatttggatggtgacagcctgtcgagtattagccctggaaatgactggcttaggcctcatggtgagttacaattccggttgagcccatgtagcaaggcatgttggctagttcgatatccatcgcccggagtggccctttcttagtccgtgaagggacgaacatatacgaatcgaccatgatatacaatttcaccgtgaagaagttccgtcattgaacgggaatagcacaggaaatagaagggatattcgcactatgtccaatgctacgtttgtcaattatatctacccatcactatatacgagatcaaactagttaggacgtggttctttcgaagaaaatatgaatcaaggagttacttccatcatttatcagaattattacgtaagttctccgtattctttcccggctttcccgctttcccggcttcgaatttctcgcttgcttccacttctgctcttgacaacgtagggataagtgggagtaggcttaggaccagtttctcctcacgcggggtgaggagaaagaaagtacgtattgatctgaattgcaacatgaatggcctgattgagaccatcaagacatccgacccggtcaaaccttccccggacctccgacttgacgtacaagggttgatgtctatatctctcgcccgagatagcccaccaaatgaagacggtgatgtcagaccgttatcatcattgaaataactctctctagggatggcttgtcagtagtataagtacctgcttgtctgcctcagaaaactctttcactgcgagaatcaaattcaatatcacctatatcaatatatttttcaactttgccttacagacatccagcaatcggctcacaatgtcggaccccaacaatcctaatatcaagattagatccactccacaatggtctctctacagacgggatgcattctggaataccaacaatggcgtctatccgcttttcaacacggacccagctgaggtcgagaagctcgcgaaggagaaattgtcccaaggcggatggtaagtttagtcatccgaagcataacatctcatcaacttatccatctaggtactattcgtcatgtaatgcgggcatgtcttggacccatctggctaaccgccaggcattctaccgccaccgcattattccgcgcactctagtggacacgaacactagagataccgtgactgagatcttcggtcatcgagtctcggctcccatcggcttcgcccccattggtatcaatcgcatttatcatgctaccggcgagctttcggttgccaaagttgccgaggaattgaacttggcgtactgcctttcctctgctggtagctacagcatcgaagatgttggaaaggccaacggcaacggtccgcgtttcttccagctgtaccagagccacgacgatgagcaggccatttctatgatgcagcgcgcctgggactcgggctatgatgcatgcatgctcaccaccgacacctggtctcttggatggcgccacaatgatgtcttcaccggcaactacgcattctaccacgatcacggtgtaggtgatattggcctgcaggaccctgtgttccagcagcgcttgaaagaggcaggaatcgaccctaagaaaaatcccaaggaggccggtgccaaatggatcgacgagaatatttggcatggccgggcccatacctgggagaaggtcaagtggaccatggcccaatggaagcggataagcggcggtagacctttctgtttgaagggaattcaaagcgtcgaggctgctgagaaatgtgttgaaatgtatgtcgaggagaatttgcgagttcatccatgaaaaatgctaaccccagcgatagtggcattgacggcattgttgtgacgaaccatgccggtcgccaggtggatggtgccatcgctagccttgatgctctggaaaagattgtcgatgccgtcggtgataggctatacgtaagtgagaacatgttatcagatccccccgagaaagacgtatcgtgaacgcataaggcggaagggaagataacaaagacttgggggatcggagaatactgaaaccatgctaatgtatcgacgttcgacagatcatgttcgactctggcgtgcgcagcgctgcggatgctttcaaggctcttgctctgggggctaagtttgtcttcctaggtcgattgtgggtttggggtttgagtattgctggcgaggctggcgtgcgacatgtgatgaaaagtttcttggctgaatttgatattctgatggaggaggctggattccaatctattgaacagattgataggtcggctatcgacagccttcccaacacttcaaatttgatctctgaacacagtcggatttgagttccatcagggtttgggaagacaacatggagctagttgtcgtcgtgaaaagaaggcgaattagaaaacccccttgaaattgtttgactgttggggaatctggaatccgaaattattgaagtcgattcttcttatgaattctggaatgtgtgtctgccttatgtcgcgaacgtattgaatattgagtatttgatttgagcaggcaatgaacatgattttacataacccaagtagtatttaacacggcaatgcaatgcgctccgaaggataccaagcacaccgagctcgactcaaaaatggtggaggccctggctgtagtaggatctggagacttgccaggggtgctttccaatattaggggtcagcgcctcattctaatataacaagattagatttcgtaatggtaataggaaaaaggaagctgagagggtagctctgaagtggttgtgaacgagggcgatcaagaatattacgtaaggtagacgacagcaggattttagcggtgaatggtttctgccaggacgaggttgcgaccgactttccgttgagaagtcaaatcccaccgagaaaaaaaaaggtattcattcattctaaagacttttcaatctttgcctcttccaaaatttccgagtggttcaggttatgagtggtgcccgcactcagaatcgcatcacgcacccactgccccctcggacgcatcactgacctaaacggcttgggcaaagtgacaaaaccctccgtgcagtccatatcatggaccttgtgtctcgcgcctgtgctctcgtccacaacgccagcctcaacatcaaatgaccacagcatgcgcgccatttggatgaatagctggttgcgcgcgatgagacggcccgtacagattctgcgcccgaacccgaaacccgtatgcggtagatccttgagggctgatgtgttgaagccgcagatgtcgctatgctcattagcggattcttcggcgagccaccgctccgggatgaagttgtcaacgtccccgccgaagacggcctcatcgcgagtgatggcgaatgcgttagggaggacagttgagttggcggggatatggtagcccatgtactcgtcctcggtcttggtgaagtgtggcacaccttggacgacgacggggcgccagcggagggtctcgctcgctgtgtcatgtcatgtgagaccttgcccattgtttgaataagaacaagagaaactcaccaatagcgtcgatgtaggccagcttcgggcggtcttcaaagttgggtaggcgatccttaccgacgacctcgtctagcagctgttgcgcctttttcacccagccacgcgaccccgacgtaatccaagcaacgataaaccagtccagcgcaacagtcgaagtatccaaaccagcatcggcaagaatgcctagatcaaacgcgagctcaacctccggcattcccgcagcctccgacgaagccttcatatgcttcgcaaagttccacttgccgctactcagccccttcctcaagttcccaacatgcagctgacgctctagctcgaacagctcctcgccctccttcttccacggcgccagaaacttgggcaggtgattcagcgatgggaacgagtcgacaatgtatgcgcccacctgcccggtgcgcgcaaactccgcctgcacgcgcttcccgtccatcagctccttctcgtatcccgtttgcagccggtagccgtagttcagacagtagatggtactggccattgcacgctcgaagtggtggtggaagtctacgcctttctcgccgaacttgtcccactcgcctagcacgtcccatagcagttgctgcgactcgaggtcctgtagcgggcggtagttgctcgcagcgcgcagggttaggagcggggcctccatcttctgatgtagtctgtactggccgttgtatggtcggaggagcatgtgcatgcccttagtgacaagctcgccggccatgaccaagcgtggacggtccgagtatcgtgagctgcggcggttgaggagatcgtgtgcggcctggtgagtcgacaggatgatgagaggctgcccagccatgctaaggtgcatgatcgggccatacttcttgctccagtgatagagctccagccactggaggctcttgggcagctggtgaatatttccgattagaggtacgggcttgggtcctggcggtaagggcagcgaggggcgtttgaagagtgagaggacaaggcgggcgattacaatcgcgccgagagcgccgagtagataggttgcaaagccgggcattttgctatacctgcacagacgaggcagataagtgtaactgtgactgcagctggaactgggttggcgagcagaccaagcaggccaatttaagtaccgtgtccctccctctccgtcgggttggcatcgaaagatgtgtggagtggtactattgtgcagaggccaatgagtgctcgcagctatttaatccagatgctcattgggctcattggggctccttcgacagcagcaccatactgtcctggtaaagtggaggatacgggcccgtctaggcttggagaagtaagccatatctactgatgggagtcgtgccgagtcgtgccgagtagtgcagatcgcgtggtcagacctcttacgtggatcgtctagtgtttgcaatctttcccggccacgctaatatataatatataattgctacgcttcgctccgcaactaacgtgtgggagtggggggcacggctcggggcacggccgggattgctgttggatccgaagggacacggcccgaaatcgagccgagcgttagcaagtgggccagacatcgcggttatttttgttctagtctatgttggaagcttgggattttaatattgactccaggctgcttaccttcgtcaggaatcctggacgattccgaccctaccctggacatctgtcaagtgccaacactcatcgcactatttgtattggctacagcagtggataaggtacttttgattgggaatagtctgtttacatccctgttagcgcagaggctgggatactccaaggtttgctaggctaacggtctcctccggaagctcgagtctagtcttcctattcgctgatatgggggggatcgctaagccccttaatagaaccaatttcccatctcttcccggagagtgtaagaaaaagtacgtttgggggccgttggatgccatttgtgagagcctgtacagagtattccaatttgacccatccatcagggtatggctagaataggggcgcccacagcaaaaaaaagtaaagaaaaaaatagattaaactagtaatgcctggttgtccaaaaaaatataaaacgaatatagtgattaagaccaagttctaacgtgaagctgccgtcgaggtgccccccaacgtgccgatttacaggtcccgattcgaatcattcttattctttctgctttcgccgtgtctctgtgtctttgtgtgtgtattcattacagagcttctagtcgagtgacgaaggagtcctaatgcggttagcaacgcggctagcatttgccatcgcagcctttacggctattgctgcgacccagaacattccgcaatgtgcagtatgagatctctccaatgatgaaaccgagtcacggctgataatgaccgctaggccgactgtctggccgcgggtctcaagaattcgacatgtaccgcgacagacgtcgactgcatatgcgccgacaagacactgatggccaatgtcgaggcttgctcactgggagcctgcaccgtcattgaaggacttggtatgccctggaattctactccttgtaatactgattgactaggctgactccatatccccagagtcccaaaatgccacggctacgctctgccactggccggtccgggacaagagtcttatcgctcccatcgcgacagccgttaccggtaccttggctctcgcttttatcagcatcagagtggttgactgtgctgctaagaaggagttcaagtgggctgacctgtgcgcggtccttgcatttgtgagtgtgccacggtgtgatcatggaagttaggagtctggcagctaaccagcagattagatcttttcgttacctatggacatatttgaattcttcagtgtgtttgtcctcgttaacttgagttataggtttgtgctaacagcaaagcagtgatgggttcagggatgggaaaggacgtttggaccttgacggaaaaacaaatcacgaacacagcgaaggcaagtatcattaggcaaaaaatgagttccagactggagaactaacagcgtggatagtatacctgggtaacccaagtatcgtatatccctgcaattatcctgaccaaggtgaccatcgtctgctttttcctacatatcttcccgggccccagattccgactgctatgccaggggactatcgtccactgctttctgttcatgatttcgacttttatcactgaaattcttacttgcattccggtcgaagaggcctggtcaggctggaagggcgaaagtacagccctatgctataatagcaactccttctggtgggcgcattcggtacgtcgacttttatcacttgattgattggattgagataccaactgactgaccctaggcaatcaacatcgctaccgatctatggatcatcggcctgcccattccaatgctcttcggactccagctcaagacgagtaagaagatctacctggttctgatgttcagcatcggtatcgtgtaagtagaacccaaccgtcaactcctgcgactcacttctcacaacttgatagaatcacggtaattagtattgtcaggttctcaggtctgctaaagtactctacgacatcaaacttaacatgtaaggccgacgcctttcctgctcagtgtgtttacttctatttcgtgcccaagctaaccaacgtgcacaagacaacaacgtcatggtagcaacatacagtgtcatcgagtgtaacgtttcgattatgtgctgctgcatgcctaccctactttccacccttcgccgagtcttccccacgatattcggtagtaccaatcgctcttacaattacaactacaattacaacaatactccctttttggacaccaatgggatccaaaagtctgttacacataaggtgacatacacgactcccgatgggcttgaggatgatgtagtcgagttggtggatagaggcgaggattacccacggaggaaatagtcaggtgggcgagaatgatccacattaatacagactttgtatgcaagtgtaaataagtgagagatttcctatttgttgcaggttgggtagatcgtctacaccgatatcggtcttgtgcactacatacattctgcgccctcgaacaaccacagagggcgtttcttagcaagcatttcccacttactatgtaaattattatggtattgctagaaataaccttggccacacttagccataggctaataaaccttacaagatcgattgtgataccgctgctagatttcacaaggctactcccataaccactataatatataacgtccttgatcctcaccatttttttcattcaaaatatagaattactattggtacggacgtatacacgtgagtggccagcttgtatgcaagggaaattagcatgaagcaaatgcaagaaagagattcttgagactataatttgcagctcctaaaccaaatatgtctcagagctggtcacctgcaaatttctgcatttttcgtctttttgattacgatccaacggaatcgattgaggtgcatgtctgagaggcgaggtatcgtccctgtaattcggagattgtctaaaaagaatggaagaaatgttcctcgggagtgaaggtatagcaggcatgcaggcgcagataataggaacgtcgcactctaaaacactccaatatattgctagagtgttggcatctgtaaatcaaaagatttagcactttcgagagacttttagcaggaaaagactgacatgtagtgttgggagatttcgaaaacttgacgagcgaccgcaaccgtagacaactgactacagtgattctaagatctcgttagcactacgagcagggcttttggctgtgtgtagaagcggccaaattggaagaccaattattgcgagatccatcgcgatttgcaccgctgccttgtaccatgaatatgcgttgatgttggtacacgttccttggtactccccagtccaaccggaccagaagtatgggataggtaggcactggaatgtcatgacaagtgttggagaaaccgaagcaagctgacaaccccatcaatacgtatgcaatcagctggaactgttctgaaggaaatatgcgtagatagaggggcaagaaaaataaatgtctcagggcttcggctgccatgtaacagatctccgctagcataatctgcttaatgggtccatggctgaacagggcgggatcaagcggatcaaagacatccgtcccggctccaacttcactgcttccaggccaatcatcgctaagacgatgttttgcgaccacatgattggtgacagggccggtccgattcatgtgggtatgagggtgaccccagcctccacacagcccgaagtcacagatacaaaagcgacttggcgtgttttgactggacatgtccatgcaaaagtggatatcgccggcacttgtctagaaacagtgcgcactaaagcaaaagcacgaagccaagacccccgcttcctgttaatgactaataaagaatgcatgaggtaagagcgggctgtcgccttgatatcttggaatcatttgcatttcctgtgcagtgccaaaagcacgcgtcaatgatgatcgccagccctctaaacgtgatcctcagcgtgggaatcggggcaatggtgctgtatgccatggtcctgcttgctcgcagaagggttcatgggccactaccccctggcccgccgggaaaaccaattctgggtaatatttatgatctgccgcctccaggggcgcaagattggatgcattggttgaaattcaaagatcgttacggtaagacatgtcatttgggacaccggcgaaatcatcattggcagtctaacatctcgattggcttccaggacaaatcagttctatctctgtcatgggccagaccatcgtgattttgaatcatcatcaaattgcgatggaattgctgggtaagcggtccgcaatatattcctcgcggccgaatctcgtatttgcgtcacagatgtaggtcgacgagcacaaaatgaccacactcccactaaatcctggataactagggtgggttgggagcatattctggcaatgcaaacttactccgaccggttacgtgcctatcgcaaagcaatgcagccatatctcggctcggagactgctgtgtctcaatataatgaattgcaagaggtggagagccatcgatttttattacgtgtactaaaagatccgaagaatttgatccagcatatttcaacgtaagttgagcgccgaatctcactccattgaaatagctgatggattcattcaattcagggaggcgggtgcagtcattctcaagatagcatatggctataccattgaaccagacaagatggacccattggttcatattgcaaaaatggcacttgagcaattttctgtcgctggaactccgggtgcctggttggtggacgtatttccggcctgtaagtgaggcatcttgcaaagacaggagaaacgatactaaataacgtagtgagatacatcccctcttggttccctggggccggattcaagcgaactgcgcaagtttggaaacaaaatcttcagcatgttgctgataagccttatgcctttgtgcgacagcgaatggaaagtggcaactatgatccgtcttatctgtccaacctatttgaagcaggcggatacccaccaaatggaacagaagaagaaatgattgcgaaatggacagccgcatcgttatatacaggcggcgctgacacggtatgttactactcttagtcctaagaccatctagactaacgaaaccgagaccgtctcttctgttcagacctttttcctggccatgaccctttacccagaggtacaacgtaaagcacaagaggagattgaccgaattttgggcggtgctcgactgcccacggtggtcgatcgtgcaagcctcccttacgtcgatgctgtagtgaaggagacccttcgatggcatcctgtagtgccaatggggattccacacatgtcagtcaaggatgacatgtatgaaggtcatcttattcctgaggggtccttggttttggccaacatctggtaagtctggtctaaattttgcgcaagatcgaggcgctgactatcactgaagggcctttgcgcacgataccgaagtctatcatgagccaatgaagtttaagcctgagcgctttttgaatgttgatggccgggagcctgaattggacccgcgtaccttcgtctttgggttcggtcggcgcatatgccctggtcgcattttggccgactatgccctttacttgattatctcccggtcactggcagtgtttgatgtcagaaaagaggtcagaaatggtcacgaggtacatgttgagcctgagttcagacctggggtgattagccatccgctttcttgggagttcaatatcaaaccccgatcggccagctgtgaagcgctgatcagatcagtggaagaaaccaacccttggaggggaagcgatgcagctgccctggatacttcctgatcgcgtcatcatctctatgatgaccaccctcagagatcaaaccaaagattttaccgggcgtcttgctcgtcgggcagggccgctttggcctgattcgcgcctgaatttaaaccgcttttaggcatctctttacaatgtaactaactaatattgtaattgattcctggatggaataacaggcccaaggatcccatgaacatacagcttttggcgctatataaatgcagttatctccatttttccaggtggtttactggcgccgtcatacatgaacatgaagctattcggaaatcaccctatcactatggagtaatttaaatagcatccactaccactaccaataacgaagatatttcaattctcaaaaccgcatttaattgctagatagtagagtgatcaattggctatgtaagatactgttggcacagcgattttactattggcacagtgattggctattctctatcatatagcatttagatggctttttaggaattgaactatgtctattattggtggtggtagatcgggtgatctccgcatagcttcatgttcatgtatgacggcgctagtaaaccacctggaaaagtcgagataattaaattgtatggcgccaaaagcttcagttggcataactaaggcggtatacctttctgccaggccaaattcaggaattaagacctcaatcaggccaaaacgaccctgcgcgttgtgccccttcgtactatagagatttgtatccaagctaattcccctcaaaattccttattcgtttatcatgagtcatattctgtgatcagtgatttgcgcgccctcttctttctgttttcgttcttctttgttcatattggccccatacgaaggatccatgcaaacttgggtcccattggctgggattctcccaggccgagctaagggcatttgcgccattttaattggcctgttcgggggggttttcatgtgggccatgtctcctcggagtccgtacctgaaggtgaggccgaagtaaaagccccgaagcacgggaacagattcattctcggttccacttcggggctgcagcctaaatactagagtactttcaaaagaatatatgaccagcatgaacatccttcccctcgtttgactgtaacacggctatttaatcctcccccccggccacactccaagtatttactgctatctatcagtatcttagcgctttccatcttacgccaaaaccctcacgacacacactacgttccaactcagatagcgacaatggcatcacctgcgccatcgtacaccaagaccactcactctgccacatatgctggcataaatccaactcagcccagcctctctactgcgggcaaggttgtggtgattactggcgcatctggcggcgtcggccgggccacagcctcatccttcgctgcatcgggcccccgagccctcatccttttcggtcgacgcgccgacgccctggcggaaaccgccgcccttgtccgcgacagccaccccgaggtgacgatccaaactcacgaggctgagctatgcgatgcctcgagcgtccgcgacgccatgaacaaggtggctgccgagtttggtggtatcgacatcctgatccactgtgccggcgtactggcccctgttgttccgctcctggaagccgatccggctaccttcctggacggctacaagactaccgtagtcggttcactggtaacggcacaggctgtcgtcctggctaacaagacagtcagccccaacgaggacaagccaatcacattcatcaatctgaccacggctggcattattttccccccattcgccggcatgggcgcctatgtcagcagtaagatggccgccgtcaaggtcctgcagtccttcgccgtcgagaacccgcaagtgcgtcttcacaatgtacatcccggtttcctcgaaacagccatgtctgctaagctgtcagagtccattaaattaccatttgcctttgatgaaagtgagtatcaactgattttgtcctttgtggttagtccgtctctgtgatccattaactaatgactactcttttccagtctctcttcctgccgacttcctcgtctggattgtctcccccgaagctgaattccttaagaacaagatcgtcttctcttcttgggacgtcgatgagctcaaggctcgcaagaacgagattttcggtggcccgccaggaactggtgagctctggctcggctaccaaggattcccacgattcataggtggtcaggctttgccaggtacccagtaggcgatcggtttcggtatgagaagccaccatccctggctggacggtatacatgcgcgcgttgattaagcaactacacgagccattcacataaagtgctagcacgaaaacctgaatgaaaaataaaatctataattacattgcttgctgtttgacaaccgagtaaagctgagagcacctggatggatgatttctaggcggcaaattggtcaatctttgctatatcatcaaccagacgcagtgcaattgagatgcccatattcctaccaaagtcttgtaggcgttggatgatccaccttctggtctcagcttttgtggctgggcattttccaaccatgtacaagcaccaggtcaggatatacccgcctgacacgctgccgcggaaggatagatcgacggagggagtgttggaagcggaggataggaattccaaagcctgagggatggtagcgagtatatcatctcctagcattgatagattttgcattgccatttgaacctttagctccagagactgccggacggccgacgtaagtgtaaggtctgtcacgagaatcttgttcaagaggtataacatgatctcgtatacgatcatttgaagatttctgaggttattccacactctgattgcccaagtgtccttatataggtcaactcgtccattatagcttagttttggtgcccagcaagcattttgggtgactgtatagggttcttgtgtggcgaggagcaaggcggtgtgttggaattcacgttccatcatagtcgcttcctccaggtattcaggccaaggaacttgcctagtgttcgccctaactcccatcaggaggtctgcgcaccgggtacctaagatccccagaagccaaaatgcaccagaggcgtcaatgtgcttggctgcctcttcttgaagctggatcatgtctttcggaaacggttcttcgttatggacacaagcaagcacaagatcagcgcgaacttggttaaacatgaggatcgtggccgtgctagtgaattggcccttgccccgggcaactactaacgctgcagcgccctggacatgtcgaacccacgatttgtgctcggagacatgctcaaacactcctaatgagattaccgacattaaagtgctgtccttgacggactccacgggcgatgttaaggcgacattcacattgcggatcgcctccgtgtatttggctcgcgcgaggtttgccaggtcagactgttgggtcgaattggccaaggccacgagtcctacggccgccatgctggccaccagagtaggatgctcgccatcttcgcgataaacagaaggaatatagttcaggcatccccgtgaagaggactgaccgctgacaaagttgcggaggaagtaattgacacctatgtcgtcggcgttggggctcaagctgcgggcgggggcaggcaaggcttgggcgggactttcgatcttcggtttcctgtatcgctgtatggtttggtcggtctggtcacgaaagacgaggtcccatttatctcggtacccaggacattcttggcgcattcgaatgcactgtccacaatggggagtctgctggtcgcactatgtagagacacgacaaattgagttctgacctgacagacaagaggaaaataagcagagcaaaggtagaacggcacttacacgtcgtttgacagcccggcagttcccacagcttctagaggctcgagggcgaaacgagttgagcggggccatatcgatacgccaaaaggagcgggcaaggacaatggcacaagagagggcgcagggtctgtcggaaacccgagttccctattccctagcaagtctaaggaggcactccccaataggctcagctcttagtctcgtgtccgtgtccagctgaagatcctccacggtcggcccctcggcccccacctgcagtacggatacccaggtaaccggtactgtgccccagtcgaaggaaatccgcgcggtacggaaagacattcggactatgatgagtcttcgggtgctattacagcctcgccgtcgtcatcacggttacacaaaaaccaatccgacattggactgaaaacatgaggactactcgtcccgtggtgcgctagtcctagttaggtcttttgataagtcagccagtcgttctaaatctttgagaaatacatctctaactgctgacatttcactatcaactctcattttaaagaccagaaaatccgacagtctgtctaagtattagcagccagcgctactacttcagtgacatcaaagacatcaaggccgagagccatccctcctgtcccatcccttccaaggtctccctgctgcgcgaggtactgtaacttagcaacggactccttcagctcttcctcggtaggcatgttgacgatcatcagatacatcacatcctccccaaggatcttaattctactgccagtttccttcttctttcgggcccacttctctttccaggtttcactcgggggaagaccttgagcagcccgcttcttgtcctgggattccttgatggcagccccagcacgctcaaatagacttggcttaggctggtacaagccaccgctcaaggtcgtgagaagttttccactattcacgggatggttggggtcattgtagcgtgaagtgaaggccttgcgtccggactcgggaacagccagcgcagaaccctgatgctgggcttcctatttcctgtcagaattgctctatcgatatgcgagggcgtgagtgaaggaattggtactcacgaatgatgcctgggactttcgatcgatgtagtcccgaacccaggttcttccactctggaaagtcgacttgggttccaggccatctctgacccgtatagcagctcggtcaatctccgggaaaactagcggtgcacactccggaagctgcatttcgcctctagttgcgccatctcccaatcgataatgctgcatgcgttgcttccatgcgttcatttgtgggtgctccttgctgtgagtgtactttgaaattgtcgctgccgcatcgaattcaggtctttcgggctgagacaggccggcattgacctcacctgtcgctcctgattgattaaaattgatctgctcggttgagaagagttggccaagtcgattagcttccgagttaggggagttcgaatcctgttctctttgctgcttctgcttcttcgtgagcttgggaggctgatccgtaaatttcatgatcatcgcgtattgaccacgaggaataaagatctcttggtttgccctatcgaggtagctattggtacggtgacgaatttgaaattgctgtgctgtgtccgctacaatctggatagctgcagcggtcaacgcaactgctaatgaaggggagaagccagtgatgttggctgcgcaaacgatgacctggagccacattgaagcctgtgataagagtgagtaagtaaacgcaatcccataatggtcaagaaaaggaatggttgtcaccaacctgactagctttatgaaagtcgctgatgaacttcaagaacacatcttggctgataccgcagtcggccaacacgggcgcatatgcacgcacaaatcctcgcttcttcgcgccaggcctgcgttgaggaataattacaggatatgggagtcgctgcggttgggctggtggtggcccagccagtgccacgagtgagcgaatcatgcgctctcttttcttcgccttctcatcttcagagtcctgtgcactaatctcatcggggtcattatcaacactcatgtcgaagtctttctgagcacctttcggaccagggtgagtttctgtttgatcatatgtgggcaatccgaattcttcggtcgcttcgtcgagttgccaggcagcctcatctccatccatcgagcgctcacggtcgtttctggtgtcgaaagtgggggtttcggtgtcttttcctgtctcaaaagagtggtaccctctcttttcttcgacttccgatgaacatctcgctttgtttatatccctctgtcgttccaagccgggtgagtatggtggaacttcatctcctgttgggagccctttctcgctgccccactctgagcggccctcacgattgggtagctctgcacgaccttcgaggccgactgtataagtcgtccgactatctgcaccgaccgagtccccacaatcgctttctacgccagagatagagcgaggggtctctgaaactgacacagaatctttgtttcggtgtcgggctgcatgggcagcttcagaagtaaaagcaataccggagccaatgagtctggcgagtcctttacccatggttgtggtggtggatggcgtgagtcgtaaatagatttgaatgaaggaatattttccaaagaccgctggggttccgaaggaagatcgttcgaagggtttatgtagagggaggaagactctcatccgcccatcatccggcctctatctatctgtacagtcagatcatttctatatccgggaattaggatgttagctcgaaggacagcaggagggatccgcgtctcccaactaaggcaaccaaaacggtccactttcacgacttctccctgatgacatgtgccattattctgtccattccagccttgtctcgcccagaaagcttatcctttcgagatcaaagcgtcgattgaacccatagatgactgtttattggccgagcatctcacatacctgaagtggactagcgctgtcgggaggtagcggatccagctggccggagctcagccaatcatagccctgagcctacctgactttgctatgtatgtctggactcttcaggcggggagctccttctctcggatacaccatgtggtatacaaagtgtgtcgagaagcccgctatttacgctttcactgagattctaaacttcggaggtattgcgacgctcaacactactggcaatgtcgtggacctgttaggacagaatatcccatctcacgagcaacggttagtaacaataacgaacaccctaccatttcatgctccacaaatctaactatttctttagtgccttctagcttacagttttgttccataatctggatgccaatgtctacatggggatttccaagatctgggagatgagcgtgagcaaaatcgcgaatgtggacagcatattcgtggagttctttgttcaacctcatcccgtcactaacggcaccaacatgttcggcctgacgcccgaaaggacagacaacgtcatgattgacatgactgctggctatgcaaacaaagcagacgatgtgctagtcgaacgagtgatttaggacattatgaacaagcaacgcgcactcttaaagtctcatcggcatctgatagacttcatctacctcacttacgccgatatctgatagaaggtcctctcgagctggggtgaggataacattgctaagctcagagctgccaccaaggaatacgaccccaacggcgtgtttcaggaacaggtccctggtggttacaaacttccagcgcaggtcttctgattgctctacggcgaatataaaaagatgggcgcgctctgtcgcacatgagctaagcccaggagcaagaacctactcacatctgataagtcagggctaaaggtataatataagcctttacttatcgaaaagaggagatttcagagtttacaagaagggatgatatgaatgaccggtttggaagcgatatgttgagggaattattctctaaagagatatgtgctgatggatttatggcatgttgttgaattggtagattctccactgcttgccatgtttccggagatggatgatattcacaaggtgagatgtgctggcatcatggctctggcgctttgtggaatgccaagaacatttccacaacacaagagttaatatgtgttcgttgtgtttcgtgtaaaaaaatgggttatatccttatgtcaaatgttcttatctttgaagttctggtgttcacgccaagccgtagttaaatcattctgagccgcttcgaccgcctttgacagatgtcccactagtcggtcatgtgcgattgctggcaatccagtagaaggggcgttggcattggcattggcattggcatctggtgagtgtgacgtaccagtctacttggtacgagccgagaacagagaagtgctaacagaaccggattctgaggacgaagagcgcatccgcattgtagcatgcggcagactgacattccagcatctttgttgtttttaaggacagaccccgacatacgtgctggttcaggaccactggcactctggcctccgcttctgcgacgatttctgagaaaaagcaactgttttcgcgaatgtggagtaagcggagatttagggtcgcagtgataatgcaaggggggcggcattcagcgagacaagcatatgtcatcgttgtaggcggcggtattgttaggttaaatcccagtgagccctcggagccaaaaggcggagtagagagagatgaagagtggctatagttgtaagcggacagaagattcggaagcgtagagtaatccaacatcggctcatcagaatcatcagagccaagggcatagtccatgcagaaatcagagtttgtaatgggaccagattctgcacatgattccaggggcgggcttacaaggagagaatgcagattggcagtagagctatgatcaatgttcaagtgaacatcagcagcctcgaatggcggttctccgaatagactgttgtttgcagcgaatcctgcgggtggatttagcggatcgctaggttcagtaaatcggggtatagttgaaagccgatcatcgtcattgctgggaagcagcaccgggaaaggccccgaatccttgccgaagtgtatatccaaagaacccagcggttccaaagatgtgtgatcgaaatcgcgagtcttatccgtgagcggcgtgacttgacctaaatgccagaataggccatgaagttggtcatttggtcgggcgtgactcgaatgtttaatggagtgccccgagtgacaccgatgacgaggacatgtgcacggtgacctgcccatgcagaaatctccatcgttaatgacaggagtgtacatattggccaaaggccaagaggtcgcaagatcaagatgtctgtactgaaaaccttagaagccaggaagcagaaagaaaaaaaggtagagaagtcttagacaaaggtcacctaatcttagaacattcttccacaggacgccatccattcatctctcaatccacatccctgcaacgagaaagccccaaaaagatgatactaacgattctcaacccgggtgggcactcacttgtatcaggtatagtgcatagcattagtatagcgcgggcaatcttctttggtgctagcccgctcaccagtggagaatagtatttggcccctttaaaattcccaaactgtgttcacgagtcatgtaaatcggtctggggaacgtcgatgaaggttggtaaatggccgataacttataaaggttgtgtttgcctgggtagcaggaggatggtaagcttagtagggtgaaggttggcctagtccctcggttagctttgctggttagctgtgctggtggcttgaaagtgtcgcctgtggctccccgggaggtctgggctcgaagatgcccaggaatgagatcgatgagcgagggatgaaaggccaggaggaagcaatatcaatatgtctgtattggggggaagaaaggaaaaagggagattaaatgacaatgacgaatccccgattcaattaccattaactgcaaaacttgtaatcgtggctgagcaggttgtggtctcccggcgccgttgaggccgctcggcacgatctcccactcgcgctacgttggtttctggtcgcgaattccagttgatcttatccgagctttttcaataacctcagtctatcgtgtggtgagtgtaagtgtaactgacggagccgaaacctttcgcctttgaagcttccgctttccgcgatcacacccatcgtggaatatccaaggaatattattagtttaattcgtgagagaaaaacattcttggggcttggtagccgtatcttgactcttgagcctaaaaaaactcaaaagaacatttgaaaccagcacggcgcttacaaggtacagccctcgactagtacgggtggcatacttagtggcccaaccccgcaccgaaatatcatttcccagtttcgttcacattacttcggtgccttgataccggcaagatgaaaatctctacatgtcttgtgccgttgatgggagtttacggggcagatgcgaaaggtagcttcctccagtctccatctatcgttgccaccaacatcaatcccgcagaagccatccataccacaaccgttgagtatgatgggaaggacggtatcttgttgccccaagacaaccgcaatggatgggtcaatcctgaagatttggctcctatgccacagtgcatcgcccagcaagatcagtccacctggctgcgtgccatgacgaaatgcaccagcaaacgatgcacctcccactttgcttttatctgcacccaccaccaatggctgactcaactcagctgcctcagcattgcattctcccccgacattatcgaaagttatctcccatactgtggtcgatcggttcttgccaaagcgcagttgtatcaatgggttcatattatcacaggtcgaacgtggcttatcgatgtcggcgacgcgagcggtctgaaaagtctctccccacactccctagctgaagggtatgcagccgttaacgtgattcacaatgcaccaacatgtctgagcgactcggtctccgcttcatcgatggaaccattccgacatgtaatggcctcctgcggtttcacaagcactacccaacacaccggaaacgctgctcgtccctgggagtatagtgaaaggctacgttctatgatcgctctagattttgaaactgttggttacgatctcgttcagcgtcgcatctacgatctggtcctgcatcgcatcggcgatggcgactattttgacaaagattgcttctgcaacaccttcaatatagatctcaacaatgaaccttgttcagggtcaggacaactagacttcacaaaggagcgtctctggatttatgccacgtgtgggtcgacatccttacccgagaactgggcggacacactcaaaaccacccaattcgcgtacattcccatcgaagattggcactggcccaaatgcgtcacggatatgccggagcaagtgattgggctcactgatcagtgtgcaaccgatgcttgtgaggtcggtggctactgcaaaatcaagcgcgcagttgacagggcttgtttttgtcgcaacatcaattatgattcctgcggagggtcgtgccagatatttgagacacgaattgactatatcaagtggctccatgatctttgtggcaatgtgcaggactggcacggtctgccagataattggcgtcaattagccgtcccgactaccctcgacatgattccgtggggttggaaattgaagccatttaacgattcagacattacctataccgcctctttgggagacgcaagggcaaccgaaaaatgtgcctcgaatgagtctaaactcacaagctttgctctagtcaatatagctacttttcttggagtagctctcagccagagaataaggataatacgtcgagtcgcacgccgccttccgtggaacccgcagccgtggccatgggttgtcaagggaacattaatcgccgccctacaactctttgcaaacctgttcaatattcttcttattcaacaaacccctggctatgagaacgttcccgtgatccaattaatgcttctctggagctcaatgcctcggcctacttggctgacgatttctttgattggtgtaccaacctttggagatttgaagttcttcgcggccgggtcttcgctatatgctgaagtgatcctccagtttctatcagcatattacctgcttatgaccgttcattatggtcgaaaacaccatttctactttggaggcatggacggagcggagagggggggacctgcaaaaatgatgtatgccggagcactcgcgtggcttatcatagttagcgtggtgattgctcaggtaatacgggctattaggatgagcaggttgactagacctgttttcgacacaccagactggcagggaggcaagcagacaacatcgaagattgaggaactgatggaccacttggatgaatgttgcacagggttagtggagagtaggggctcagaagaaacaccgttgataaagagcaaaggaagagatcacacggactatggcacttactctgtgaaaggccacgatgaccgggtttccaagaaatcatttctgggattgtatgcggctacgatcatcagcatgctccttctctggattgcgcaatggctgttttggggtggatttattggtcttagtgcggaagagtacgtattgcactgtcattatttggtctatatcaactaaccgaatataggttctgtttgcctcaacttagggtcctcacggctatctggactgcattctcattagtaggcgctattattattatttagtcaagtttattgtctacttcgagccctagatctctgaccgtgtttcatgaactatccaaaaaaccggctctcataacaacattactctctgtgtgacatattgttcggccactgggcatagaagatcaacattgcaggattggtcgttgattgatgccggcttccccatctcgagcgcgaataatccatcccagcctggcatattgccccaccatacgcgttttcgtatctccccgtcgaccgcaggccagggaccggagtcgatttgcagctctatctcttgggctacgcgcaccgctgaaccaatccacacctagctggccgactttgagtcggcctcgtagagaaagatgcttgccagcaaagcggcctgagctcgatccagattaaagttgtcatgccagatattgataattccagaagatgtgcgaatgtatttcttgccttcctcttcgctgttcgactcctagaccctagtggaaagtccacgctgtcacgatccacatggattgctatcacataataactaagatccagctacgcagtcctgtagtttgagtattcgcattttcgctttcgtacactacacaaatgtctcattgcgagtacaaatggtaagagccccaccaatcatatatccccgagcactaacatacaggaagattattggaagaataataccaatttcccaacgtaagataggttttgcctccctttaatctttttcaaaagcgtctaagcgactgacagtatgctgacgcgccacagtggcttccgcatcgatttgtggctgtgatggtggctttttcagccgcagccagatcagatacttgtcccacctaccaaagcgctgctgagcagctattgtttcgaagatccagtatagcacggttgtaaccgttacttacaatagagcttgagatccgccaaagaatctgctcaattcgagaaggaaagataaaataccatcctatgaggtgaaaagaagcgaatgccgaggtcaacaaaacagggaggatctttcaaacgttccgatattcgggaatcggtcatttggaaagcgccgcaagggcctttcgcggtcatcaagacatagaccaaagaaccgcatcacatcgtaactacaagtgaaagattgcttggcgataaaatcgtggcggtaaggtagagcggcaagatcaccagcttcaaggagaatctcggtcgtgctaacttccatgctaagcacaattccggtatgtacatcgcttggtttgtgcatccaacaaataaaggttccaaaggtacaaatcacaatagcacccgcgaatagttcaagcgtagtggtcggaagcttaagaatgaagcgaccaaagagttggatcatcagccaagtagcctacgccatgctgagcagtctggcgagcgtatccgtttttgacttgtcccgtatctcgctctgtgtaattcgtgggcattccaaaattgcgggttcaaatgagcaaaactcattcgacttgttgatatatgccatgcatctgaggcccctgagatacaccaccacaacaaatcggccaatgcagcgataaacggagggttattgtctctcgcggagactatttttggccgccaatcgcgacacgtattcggtgtgatgagttccacagtcgcgtgttgcccgcgaacgagacgcttagagatttgagagaaaaagttgcaccccgccaagatcggttcatctctgaaaatatttcggaatcttcctgggcttcctccaaatcaccacacgttcagatgctcgtggaagaccgcaaagatgacccgacgcacgatacgctccgctcgaagactcccaattgttgactgggagcttggcagccacgtccaagccagacaatcagtcataccggccaactattggaagaaaagagctgattccaggatgactgcgtgataatgactatattttggagggccatccaatgcccacatattcttacaaacgattattgcgcctgtggcgttgtttacatatcgaaacaatgaacatctggacccatcttctgggctcaatggccttcattgctgttggatttgaacttaatcacactgtcccgcgttctcaagacctcaatttcgaccgcggcgatgtatttgctttcgggccctttacggcctcggcaaccatctgctttggcctcagctcggcgctggatttcacactctaagaagccactcttacaatatccaccatctctggggcagactggatatcctcggaatctgcttcctcgcccttgaagctggtacatccatgacatattacgcattttattgcagacccttcatccagcgggagtactgggggctcaatcttttttccgctattggcgctgccttcgctttgtttgacaccggcggtggaggtaacaaaatgaggactctgcgaggaggtgtcttctcccagctcgctatctctgccatgttgcctatcctccaaagtgtgattgacttgggttggacgcgtgcgagtaatgaaattggggctgggtggtacctcgcagaagcactctccctcttgactggagtgagtgttttcgtctgtcgattcccagagagactgagccccgggacctttgacatttggggtcattcccatcagctttagcatatgtttgcagtgcttggcggcgcttttcatgttattggtttggtggctgcaggcaactaccgtcggatgcacaaagtctgttgagttaccccgtagcacggtcttcttagactcttgcattggaccattcgtacctgaagtaatgtagaccaagagctgccagcatagaatttttcggtactcctaggtcttcatcgatgtacttcgtcaataatagctcattccggttgtggttgcccaggtgcatgccgatacagtacttccggaaatcggtatcaccactttacacactctttcattgtttgttggactcggatgtgaaatatgagtttctgatctaagccttgtacggtaaaatacaaaactcattctatctcctttccttccttcctcctctctctgtcagtgcgagacagtcaatacatacagtgttttctccatttgattctccatttgactgtccattgtatcgcatctctatcaccggtacggagtagagtgcttacctataagatagtttgttttacggaagacgcatatacagcggctgaacgcttgggcattgtatattgcttcgactgtgctcttaaaattcggccacgggctcaaagtcccgacatattccatcttgtgaatagcagaagaggtggtcctataagtaccaacgttcaagggaggtagtggggcctgaataatctgtttggcacgcacccgtgttgtggccatagtgctctataccaaactacgagtcagtatgggctgcttactgtgacgtatggatggggatattgcttatgtaggacgtaggatggagggaatgttaggacgcattgtgcagtcgatgttggtcgaggagtcaacgttgctcgaggggttgacgacgaggaatcagcgacaagaagtcaatgctgagagatcaacgttaggggatcaagttcgagtattaggttgttgtcaaggaaggggtgggaaagaaaaatgacagagactccagtttcaagacgtccggtgtaaattccctaagagctctaaggttcaattctcaccccggtgcctaccctgtccttcttctagactgtcacatggtttgcgcccatcgatgtgagctaagcacgcatcctctctaattgattattgacaaaatacatatgaaaatcagcttaaccttctagaattgcagcaaagattggaatcatcgaaattgtgcactttggctaaagcaatggacattcatgttgatcaccaagtccacttagtactgtccttgtcccaaccagccttcctaggtggtatagccaagccccagccgacaaaggtcatatctgtaaatttctcttcggggtcaagggaggcagattctcggaagcctgcaatgtgcctagggatagtcagcctattctgtttagcaccaggtgtacggaagataccacatacatcgtctgtgtagcctcgtcgtatatgatgttctccagcccgggcatacctggctcccatccatatcgtctcaactcccttaggtctgttagctttactctggactggtagaatagggacttataacatactcccagacaacgcggaacttcgcacggacggcctcacgtaatggaccagatgtaggatcccagactttatcctggttcagtgactttccggggaccatatcccacacaatatgtgtaatatatccatctgggaccaggccatcattgccttgttttccttgtttataggcgaggagactcggtaccacgggacactgtcgtagttgcagatccttcaggacgtctagttctcgatgttttcgtgcagcggcctgtcgttgtcgaacctcggggcgttcgtactcagttccttcaataggaacctagaaatagattcgcatgaacgccttcttgtcgctgtctgccgcactgtgacagagacatttaaacacggcaaagggaggcccagcgccaccatcaagttcccattttgtcatttgttggacatcttcggtcaggttctcctcgataacccacttctggactgatggtgtggcaaaggtaacttctgtacctgtgtaaagttcagagaatccgagaatagacattctgacgaagaaatttaatgagaacgccgataaaagaagcttaggaaaaaaagaagaatgagggaagaaaaattgtgaaatagagttgtgcagagaaaaaggattcaaggcgtaaaaatgatgtgtagttttgtttggcctaaattctcaacctcgtcgatcaggcacttatattccgattactctggggtctttcagacttgaaatagttcaacttcattctgtttacattttgcttggatcatataatctacacagtctctccctatctccttctcctgcatcagtaaaccttctcagataattcgaaactggtcacatgtgttatctgttctctttacctcgggcaaagaccgatacctccggatactgcgaaatgacctcctcaagcggagtcgacgatgctcgacggagcccaaatcccaaaaaagcagtgacagttcggtgaacaatttcgaatgccttggcaccatccaaatttccaaccatcctttgcagggccggtacattttgaacaggaacatccagcagcttcatcagataggacaagtcagcgaatgcgtaatgttgcccctgggcaagttccagctccaacttccaaccccgcagactcgaccagaactctgcccacgatgagtccgttgtctggttttattttcatgtccaaacaggaggaatggaccccgaacaccttgttgaaccaccggcccaaacattgacccgtccaggttcgctccggcaacaacacgacagtccaaacgcatggcttcagcagcagccgcacccccaactgagtgaccgtacatcgcgacctgccgagtcttcagacccgcagcccctgttccagggagtagagctgcgactccagcctttgtgctcagctgatccagcacgaacgacacattccgcgctcgggtgttgacgtccagtgggacctacgcgtcagtgatatttgcggcagtcacgacgcttccgtccggaaactcgaggaactcggcatcatagggatggtcaatagacaccacgatatacccggcgctggcgacggcctgtgcaatggcattgtagaacaggcgggtcgtgccaagagcaggcgagaagatcacaacgggaaactggaggtggcggcctttcggcggctctgggcacgcttggaacgagatggattggatagtcccgttgggaagtcccagcgcgctgtataggtcagagtagtattccgctgttgcggggggcaggtagtttatcttctcgagatcgattttgcagtgggttggggcgaagaccgaagtcatcactgcacgcgatccgttcttgggatcaaacgggtcgactctggtcttttcgatcattttcgccgtgttgtagaacacgtcgtattgtccgggtggactggggagcaccactgcagagatggacatagccacgatgggcaggagacgacaaatgagaagcatgataagccaagataaaccaatagaggaagtcgatgataaaaattgacgataggattccaaagtcaacagtcagagcactgtctgacctttatatatcacggagggaagggggagtggtacacgagcattctgcctgctaacatagcccgtagcaacttctcgccctaccgaggtaactaagtttcccgaataggaatctatagggcgttagttgatcggatgtaaactggtcatcaagtggaatctgaagccatgtagcgccttgtctcgcgatattacttcccaatcaggttagcgccatctggcacatcgttgtctgcccacagcccagacaggtctcgctctaatgtatgcactttcgtgatagtgttcatcaggaatatgcactatttgggagtttgccagagcatctttccagatcatgtcatcatcaacaacgtcgcaggggagaatggtcggccccctagacaagcgaaggcgggtgacgcgctgcctcggctgcgctaaacgatgcatcaaggtctgtggtgtgaaacttgaagttcatgagactagtgcagctaatccttgctagtgtgaagggggaattccatgtgctctctgtattcgacaaaacaccgtgtgcgttgcccagcagcaatcagggcaggatatgactatgtttgtcaacaaaacccagcaaaatgattttagaggaggacacagaagttctgctcagaagggcatggctgttgcaaatagctgcagctccgggggttcgcccacttcactctatcgggagggataaggatacccgcctgcttgattattttgccgcttttattcagcagaacatgttcacgacgagcttctcgtcgatagttccggacctgactcctctgatttcgacttccccggtcctgtacgatgtggtgatagcgattggtactttatatgccaatcgatgtacaggtggacacgcattacagggagagaaatcctcctatgtacatgccatgacctcttatcataagtcaatgggttttttgcggacaagtctgggaaacagcaatgtgatgtaaagagaggatattctctgctacattttttctagggctgtttgaggtaagcgttctatcagaacgagtatcctttatcgaatgcattaaatatgccttttactgacatcaacgtacctagttgctctcagacgacttagactgcccgacgacatctcagagggaatctatagtccataagcgagtcccagagagttgggtcagctcggtcggtcgacgtgcgggctcagccctccgagtagggtactgtcgatcgccagaaataaatgtagattggtagaggtgaacaggtgggccttgtaaggctaaacaagtctgtaggattggatgcggagatggatggtggggaatcggtgtcgatgtcgagaatgggcagttcgtaggcgggcacacgaacttacaatcattattaattatgaactcatcgttcctgatgatcacattaagctatacgaaccatggaagaggacaccgagagcaggcttagggagtaacaatcctccagttgggttttaaagaaaatagttgaatgaacgacgctttctatttctatttgagtctatgcgaagaagttcaaaccttggaatcagcagcaataattgcagctgccttctcggcgactgcaaagacagtagcctgaatatttccccgcggaatcaaagggaagataccagcatcgaccacgcgtaggttttgagtgccgtaaaccttcagtcgagaatccacaacaccacccctttcacgaggcatcatggcagtggagcctactacatggtagtgacaaacgattctctcgcgagctagatcgcgggcggtctcaagagttatgtcgcgagatgagttttgcaggcgccgaccgtcggatttcaagagagaagccataggctcggtccaagcgagagtttccaaccagcgaacatggcgcgcgtgaagctccaaatcaagagggtgtgagaaaaacccgggatcgaatttggggttctctttcgcatctgaggaggcgagatggacagttccgcgagaaaatggtcggttgagcacggcaacgatactaacaaagttctctggctccgtcatgccaaaaattccctttgggcttgggcccttgtcagggagaatttggaaaggtgccagggtgtactgtgcactaggctcagtctcatcctccaacatctgctgcagtagttgatattgggcctttaatcctggtgataggttttggtcttggaggtattcatcaaaaagccttttcagctcaccatctgcaagctccggtagagtcatgtatgcagatgccagtgaacaaagaccgagtggtccagcccctgattgctgccaagccgccatggctgctccagcgatctcgggattccggagagcctctccggtcatctgcccttcggcaacctcccagctgaacggaacaaacccgtgctcctggaggttttctccaacattggagttttcgataatcggttcaattccgtgggaatgaagaagagcggcgtcaccaataccagatagttcgaggagatggggggtcttgatcgcgcccgcagccataataacctctcgcttggcggaaacagatttctgaattccatccttgccggtaaactgcacaccggtggccctggcatcctgtggaccctctttctccaaatgaatcttatgcacaaaagcttcggtgatcaccctcaagttcgatcgcttggcaacttccgagttgtagtacgtcacgccagcatgactacgggttctggtcgtcggatggacagtacctgggttgcagaacgctcccttggcaattcccgacattggatccccgctagtctggtgattgagagtttggaataccttgggccatgcttcaaggaagctagggaacggccccgtaccaaaagagacttggagtgggcctgattcaccctgaacagacggatcgatataatccaatgaaagctgctctttgatctcggcagagggaggggtgaaagtttgcgactttttcaaatattgtgacaccgaatcccagttccaaccgtcgttgccaagtttctcccagcggttgatatcggtttgactagggtaaatagccattccaaggttgattgctgaggatccaccaagtgttcgtccgcggggttcggcaaggcatcgtccattgaggcctttctatcaacaagtcagcgggattgaacagcaccgtgcacgtgaaacgaggcagggtgactgcatacctgaggtgtgctggtgatgcaccagtcaaagtcagggtcaaaataggttgttgctgccagaccaggagcagcaattcgtgggtcatcaactcggtttgctcctgcttcgagaacgagaacgctgcatgagggatcttcggtcaaccgactggctaccaccaagcccgaagtcccgccaccaacaacaacataatcatattcctcgcttaagtcggtaagtaacgaggtatcgatggacgccatgatttccaacgctctgcaggttgaagtgaaaagggatcgagcggtgacacgcgggaagcgcggagatcgcagggaatcaagtcattattcaagactgttcaggcgacaagcttaacagccgagaaaccgtttcgctatccccaattgagatgttcatcccgaagccttactgagaacagaaggacatctgtcgactacgtacatctgttaagttcattgaacatgattattggccattgttaagagactaacctgatcagttcaaaatagcgtgtggtcaatagtacgagaccaacgacaagagaagattttggttgatcagtggagaagagtaggatgaagaacgtatcagaatcgcattgtaatttctgtaatttcggggcaaatatggggtctcccgtgtggcggctggcccccgggttccggaggaacnnnnnnnnnnnnnnnnnnnnnnnnnnnnnnnnnnnnnnnnnnnnnnnnnnnnnnnnnnnnnnnnnnnnnnnnnnnnnnnnnnnnnnnnnnnnnnnnnnnnnnnnnnnnnnnnnnnnnnnnnnnnnnnnnnnnnnnnnnnnnnnnnnnnnnnnnnnnnnnnnnnnnnnnnnnnnnnnnnnnnnnnnnnnnnnnnnnnnnnnnnnnnnnnnnnnnnnnnnnnnnnnnnnnnnnnnnnnnnnnnnnnnnnnnnnnnnnnnnnnnnnnnnnnnnnnnnnnnnnnnnnnnnnnnnnnnnnnnnnnnnnnnnnnnnnncgggagccccccctgccattccgagccgtgtctgcacataccttgcccgctagttacactgtagatcataacaggaaaattacttccttgatagagcgtggcttacgctttatttcttaaacgtcgacccctatcgctctatctatcaatccctactccgtactggtaggaggggatagtaatcctgggaattgtgattcataatgactgtgacatacccgctggatacaccgcttagccgcaatccagttatcgcagtgacggtactaggtgctctggcgacgatcaccaccgcgttgcgattttgggcgctggagatgagacgaatgagtccagaagcgtctgaatatattattttggccgcattagtaggtctgactggaaatttatgatgcaaaaacccttgcagttacaatcaacaggttattgtatatgccgacattgcactcgaatatattcgtatgtttggagatattcccgagctctccgtcttcatcttcaagaaacggtcagagtgactgacacatgaacagttacttgactatggtcgtggaaacggccatcagtacgacgaagaaaaattttggacacggtcgacattgcatcgagctttgccttttcctgcaattggcgggcctctcagccaatcgcccttaggcagtactgagcttgagggtatcgccatatcggggtcagtctgctccgagatccgcagggcagcttcctcgcttatatattcgggataggtgtaacgagcttccattactgcttgatctagccctagacgatgtgccggtttttcggcagaccgagcgaacattgcaaggaatcggtatctcaaccggtaaatgtttgccttactcaacacttcttccttaggtaaaaagtgttagttctattactagctttacagaaccttatatcaagtaccgttattacttataatgtttgcgataaaaagtttgcagaagtcatacactttcagcgccatactaatgattcttactcgactgtgaccggacctctatggcgcgcagtttcccagtaatgcctcgttatattaattttatgcaaagaatatattaaagccttggattcatatagatagaggacctaattagctttcatacgaccggtttcaactccagccacaatgctcatttcgaatcctagcgcagctctgcgatgctctgtcgcgaagagagaactggtttagagtgttgacttcgattacccagatgaaatcattggttatgattttggtacaatgatccaaatgtcctgaagcatcagactatgtgctgcggcaaggagaggactggctctatttttcttgttgaactacctgctttgttgctgagggtggagatgtgataccaatccgtattaggcttagtgccgcagtccttgttacccaccgagggagatcccgcacgggaagatcccagtcaatcacaactggtgaaacaccaataggtgaccaagaagggtaatcatggtgtttccacctggcatcttgtatactgagaaaccgtttaaaaaaattggcagcctagcccgaggccagataccacgtatcttgataagcttggaatcaataacggaattgccaccacaattaccccatacagtacttatattggaattcacgtctccatccccaagtcaccacccgggtttgtcgctcagcgctgaacacactcaaggtattccaaccacctacgagcctttcgttcgcactgatcgatatgttaatgtctcaagccccgatttcaacgccgatcccgagattcgcgcctgtttgagcaacacggttcatgcatgtggatgtgcgaggcatctcccacaagagacgcataaccaaaaggtcttgattccctgtttacgattttatgcgcgcaatttgcctttcccgtaataagactaaccactctcacggaacagtccttctcttctcggatccccacgtagcaaaataaatcagtctcattgacttcagtaatgccagctctctacacacctttctagttcttgagggcgttttctccagtgtgggtacggatgtgaatgtgcaaacaggaacggatcagcagtgagtgcaccatggccttaatatatttcttcaattgaatttgactgtctcgcctaggtgatctgcccggttatatcgaaaacactttcccatgaaccctcccctaatacaatcaatgttgactctatttttgaacgaccgcaggtttaacagttgaattgcatcatcccgggagttggtgggaagcccatggggataaagacagaggtccttccctccctccgaatagtcgggggtgggggctccctggggatcttgcttggacaagcccggcttcccggctcaatgaaaatttgcgagcttatcaccaaagcttgatttgtcacacccatcacagattcccgtcatgagcagagaaaaattcagggctaatgtgtcccgatcggcatattcactttccttgtggatattcggtctttggtttgcgatatatgtgggatttgcttttcaacgcaaagatataggccgtgttgcggtagtcgaatgtacttagggctgttcatatgttttcgatgtcgatattaatcatggcttacatgaaggtagtggaattggcatatatcacttgatgtttgcttcccaaaagcttctgagatctcactgactcggcaagggagttgtttccaatacgaaaacatgccagaagtgtcgctttgaatcacggtaaaaaaccggcttagaccgaattaccctcctgtggataagtaaccagttggctcgcgagaagagatcatggaggcatctcagattttttgaacccatttcatagtaatctgcttcgcttggacaaaagccgtggtatattcgctttccctggtagtgctggtagtgatcgataacgatcagtggcccaggtttgactgcgattggctaacgaaattgtcgaaagtcccacaatgctgtatcacgtcatattaatcaatctcatcgaaccaggtgtgcgctgtctcgcgatgactgtgctgcagtggaagaaagtcagacgagtcctttctcgaatttttctacacattcggccggagaatgcgataacatggcgagcccaactcacctgggcgtgttgaaaactcaatagtggacagtcccacagggtcagcagcgctagatgcgtcggagtttaatcttctgcgaagggaccttggcggcgatgtgtttctttctgccaccgtggggcggtcaccaagagccagagggagcttagaagtcaatggcgtccatgtcggagagattattgccgtccgcgatggcgcggtataatcttgggggggtgttcaacaaaagagggtcgaaatgttactagcgcgcccgaggaatattcagcacccccctctgcctgatgattgtaaggctctcaacgaccttactaagctcatcccctatttattctgcactttctatagtatataaaagtcacactctcaagtactcaattggctatgcccgtactagtccgtactgtaacgaccacgttccagcagtcttcagtacttgattactgatgtaaccttgtgtaattttgtagttacatatgagttgcttacaaagactgcatccatattaactagttttcattggctgatgtaggtaagccacgtgacgtacaggccgacctcccggtcgcgacgccaatcccagcctcctctttgccccctaccctggcccgttatcccctatcacatctttcatcatcacgcggagaaagagtggtgtcgctcaatactgtccttgttgccggtcctgccattcctgtggttacacaggactctctgatttcatcgcttgatctcggattgggcacgtacttgggacttggccgtaggaggctttacttctcttctcccatctcatctctcttcttcaacctcccctataccagtctaggctgctctcaatgtatgaggggccgttgctattaattaaacccatattcgcccaaaatgggcaccaaatcaccaaactctaccctgcagatgaagaaggaagcgcgtgttgatacacccacctccgagacttcttgtgctgttacgcttcgcattggttgtgacaaaattgcgcacaatggattcatctcactttggtttgaagggacactagctaactcacccgataaaccacagaacctggtcctgaatatcatcccaactataattttgacttgtgaatttgcggctgctaccgaaatcagagacacctcaacactgtctttgaaactctccgagcctggcgcggttttcggtcccaccggaacagactctctcaggccttttgatccggacgattcgaagttccactcatttgttgccatctgtaaatccacaatcatttctctcaatttctctcgccaccatttcgagaaagtagaaattacaaagatatcatctatatcgcgctttctacgacaaaaatctgtccagcccaggtgtttcgaacatcaacgacataacttggctccaaaacaccagaaagatttcgaaccgccagccaaactacctccatatcgtgaaaaggatgtgtcccaacaaatcagagaggtgcagcctcccgcctatcgcgagcagcccgttgacgagcaggtgattgacgagcaggtggctggcaagcaggtggttggcaagcggcgcagaggtatgtcctttaacccagctatactccacagtatcattcaatagcttacacatactttccagacacattgtcaaccccgcctgaccatgaaagacggagacggttactccttccatcgcccaaattaagagaccatgccgaggaacccaacacaccgggtgttcttaccgaacccaatacacctagtactcatctctccatatcatcattccgcccaacatgcttcgcacacacatccccggaccacatcgaggacaggaacttcccacaccttgggcaggcactctacaatgctccggatgacctgatttacgataccacgtcgagctctgagatttctccatcacaatctattcgccccacgtttttcacgcatgctccttcccctgttgctttcaagcataaaaagcttctgcatctcagccaggaccccagtcatattcctgatgagccaatttattctattgcacggagctctcatacttctccgtcacggtctcttcgtccaaccagtttcatacgtacttcgtgccccgatcccgccgagcgcaggaagctcgaaagtcttaagcagggaatccgtaatgctcccgacgagctgcttgttcaaattctcaaagagacgaatcgtgggtatctcctcgctttgccaacagacaaggccaacataccgacgcccaagttcgagtttagatccaccaaggccgcaacgctcgacgaacggatagatcgattaatcgatcaaaagtttgataaaaagtttgaagaaagaatggaccactatctcgaatttggcgattcacagtttatcgaaaaattaactgaatgtgccacaagtgagtgtcgtgagcagatctccgatgaattcaagactcgcggggttgagcttgaggaagagctcgaaagttctatattggaggttcgccaggcagttggggacgggctagaggacctcagaaagcaacaagcacagtgtgaacatgatatcaaggatctggaggccgaagtagttgcggctgcggaaacggccgcgaagaacgctgtgtcgaacattttgacacgctcgcacaatacttctaggcagtccttacttggtagcaacttctgcccgctccattggctcggcgccaatacaaggcgaagctctacctagaccgggtactaggcttacatcttggatctttgccgtctcgtatcttctcgcgtagaattccctagtttgcttttatacttgtatgcaggttgctggcctgcgaggacttcgccatgattccgctccacggaaatatccaagccgggcttccacaaagaatgcaggaccctgcacaaacgagcaaacaaggctcagagacatgggcaggcaccaagcgagattctaggggacactggagggcatgagagattcgtagcaacaaaagaagaggatcgccaggagacgaatgaacatatacagggacaaagcgcatcaagatacggtcaccgagggaccggccacatcgtgcaggtgtgggggcctgcaaaatagataagggatcgatcaccataccataccttctcaaagccaagaacgatctcacggtaactccaatcccgatcaataaagtaacctgcgatcgccataaacgcttgtacgaaggttgatgtcctgcagtcaagtgcgacggatattttttcatttggaggtaaggtagaaaggatagtatgatactcctcatcaactaatttcttgagtagacgttgagcagttcgaggatgtagtaatattggtttgtgtggagccatctgggccatcttaatatagccaagtaaatattctcggctaaggatccggaatggtagattcaatgcagtgagacattcaatatattatctctcccattgatcttgtgagaatgtagtcgtctgggcggcattaggttccagacagtactaatgttacatattgaaaataggaaaatagatcaaattacatacagctgcatgttccatagtctgttttatagactgttatctttctgggttcaagccaaccttctggcatctagaagaggtaagatggcgtttaattgtattggtgccgctctgttttgtacgtggaggtcggagacatttcctacaagatcgacacttaaccaaacgttacgaagtataatgtgctacttggtctaagcttttccaaacgtctgatatatgtcggttgtcctatcgtagtcgtcattgtgtggctgagtcgccaacccgattagttggtcgccaccagtcaataaaatcggcctttaatacgttatttatcgcattaaaaaggacgtatggcttctggcgaccagggccaacgcgttggaggacaatattggggtcaaatgggctctctatgtaagggatgtccgcttgagagcttggaggaagaaggcttgaaggcccagcagaattgtggctttattgtgacatagtcaaccaatagaccaaagatgatgcaaggaatgatgatatgggcaataaatagacattggaaaggaagagaaagattaccttggacaaatgacaacttgagcaaacggccttgcaacaaaagggctcagtccaccaatcccaaacgtgctaggaatacccctcaacctcatctttcgtcacatgagaaaagataggatggcgcgaagtgccacaattggatctgctctcccatagacgtagcggctggtctagattgtgggttaggcgctgagaaagggctggtcctgagccgctcattcgctattgcatatgtagtagccacctcaaagcactgctctttcactaccttcagccaattatggcatctgttgatagatgccgcagaggcaggtgctatgagcgactgagccattgtacagcactcgaacccccttagacatcgtatttagacatcgtattcacatctcgtaggcagggttccccgctcaaccgacctgtgcaagttcgtcctggtatattcgtgatctaaggtataaatatcgcaggtaatatcgcattttcctggtcttcagtcacttctcaattccaagtcttgagcccagagacacgaaagtctgattgtgcgataaatatcaacctcaacttcttcaatatccctacatactggacctagacgacttctagtattatctacatatatttttcgatcagatcttcccaaggtaagccagtcttcaccagtgaattttagcttaagactaactcaatccgcagataactattcgggagccatttgaaatcaccaattcttgccactggtctttagtatcaaatggtacacccaagaaatcctgggactgcatagatccaaagtataaagactcgattacataccggccccccaaataagattacccagataatagatggttatttatcggccagggaaagggggttaaggaggaaggagtagaggggaatagattcaagggagtgttaagaagtatatcaggtgagtttaatttgactagtagaacagcgtccaaatttagtcaatagactttcgagcagcactgaaaattcccccataaatagtttacctacctaccacactaggataaccattgtagagagagtttcgctcttagtagccacaaatcctaatcaggtagagactgctaattttagagtttagttatttacggggggcgtgagcacctcaaccattttaaacttatcagcgtcggaaaccataatgttttgtgacaactgtagcaactgactgtatacttaagggctgtttaagagggagggccgctggcaaccaatcaatccaccgaaggcagaagcagccacctatcacccttctcttctaccaacttaacactccttttaccagcacagcgtcacagaaatcatatatcttataaatatggaagttattcaaaagaataaggcatttaaagggattaatggcaaaatgaaattttcctctatccaggtttttattcggcaagatggcatattatattccagaaaatagacgaatcgattaaattcgccaaagacagtagatgatctccaggaactcaaggaaattccaaccgaggacaaaggcccagaagcaaaaaccgcctagtcagctatctatatgaaaacagcaagtctcctcacatatatcgatagaaaccttaagaagcaaatcgctcgcgaagtcgaaacatacaaaattctctgtaagaacccccatccgaacatcgcgacctaccatagctataaagatacccgcggtcaagtctctaggctatacttcagacgatatacattaacactacttaaagcagtcaatccttaacgtctaggtaaggtcgctttccttttaagtatacgcgaactagtgaaagcgaatatgaaaagtggcctagaaggaatcttagccgctatcaagcatctttattctttcggacttattcataacgatatcaaccctgcaaacattatacttaacgatattagtacatttattcttatcgatttcaatagctatcgatctatcggagagtcgtttcgcgacaccgaaacgaaaagaacccgccactagcataaccctgctgtcgatatttcgctcgagaaaaacgatcttaacgctttcagagatctacaaatctggttgactagaccggcggatgagaaatttgtttttaaatgaatcgctttctagtaaattgtcaacacccaggtggatcagctagggcgatcattatttcaaatgtgggcaatcatgagtagcgaaaccaatcacaaccactatgctagcaagaacaaaataagtctggtattttcattgtcaattctgaatggcatctagagtgtcgctagtccaaaagaggcaaccagccaccttctagaatcatgccccgtccttctgtgataggtctctacggcggtgtagttgatgtggtacatgtaaccccctttgaatttttgacaccactaactacaggctgattagttagaatagtccagcttgcgggactttaatcttgtatctcatctggttctggccccccgctcacgtgtcaactaatactaaagttcgacaaaatttgtaagtaaaataatattataccaatttatatactagtgtattcctcttaccttttataaccacttgatatcggctattttatagtattaaagcgggtatacagtcggctagttaaatcaaaaatataggttaggattaactatattaataaacttaaattccttaaagtatacccccttatataaattaaagcttttaaactagagataattaaaaatagcttctgagtagccagttcagtgatcaggtacttttaaagctaaatattcgtcttcgaataccaaccctctaagccgggatagcgattaggacccaaaaacgccgtcaaaccatattcaattataaaagcaagctttattaattaaagcattactttatataagatcaagacgccctccgagcttgctcaattcggctattaaccaggctttaaaagcctgccagatgactatataattgtaaaggtatacgttatgcaggtgtacggcctgtcaactgggtaagatacaaagggctttttggagggaatacaatgtattgatgatatgctaagactaattcttgctagtctcggaggggcccctggggggtcctaaactataaggaaatctatctgcctatatttatataacgaaccccttacggatcgatatcgaaatagatgtatgataatatagatattccttcctgagcctatacaggtttacatatatttccctcttatatagacctttatccgttacaattatctccccctccctatgtggatatccttatccgtatataaatagaaacgttaaaggataaaaggataaagaatcggggaggtatcggggagtttctataataaagaaagtaaagtagtggatattattaaagaagataaggtagtatataataatttaaagaga

SEQ ID NO: 117 - DNA, 53928 bp, Penicillium roqueforti; identical to SEQ ID NO: 21
  misc_feature (1304)..(5918): n is a, c, g, or t
  misc_feature (9441)..(14428): n is a, c, g, or t
  misc_feature (21327)..(21571): n is a, c, g, or t

SEQ ID NO: 118 - DNA, 29939 bp, Penicillium roqueforti; identical to SEQ ID NO: 22
  misc_feature (3252)..(4738): n is a, c, g, or t
  misc_feature (11014)..(12231): n is a, c, g, or t
  misc_feature (25939)..(27449): n is a, c, g, or t

SEQ ID NO: 119 - DNA, 28527 bp, Penicillium roqueforti; identical to SEQ ID NO: 23

SEQ ID NO: 120 - DNA, 28219 bp, Penicillium roqueforti
  misc_feature (20958)..(21052): n is a, c, g, or t
  misc_feature (25456)..(26706): n is a, c, g, or t
cgggttgtatgtggtggcggctcgtatgtgaattacgttatatagattagtaactaggtactagttactaagaaaagtgaagctttcctctaagatagatagatcttagatactagatcgagctcttatatctataataatagggattagtttattaattttatactagaagttaactaggtaactactagagatagtttaataaaaatcctaggaactaggactattaggcttataggatagtatctagaaactagaaaaattaagattaaactaagtaatatactatattcgctaaccttctatataaacctagtattatatatagccctataaaggaaaggaggtttctagtactaatatactaactatatataggatcctaataatctccctatcattaatatatacctataggattattttaatctatagattttcaataagctagataagaaggtacccttataggtatatactataagaaccttagtaaagctataagaaataaaaagcttagtagatatctggtactaccgactcgcttatattaataagtatactatagcaaagcttactactatagtagatagtattattattaaaaaagaagaatctaaactagaggataaatctctatataaaatatactatattagcagagtactaaggtagatctctagatacctagttagctatatatttagataattcggaagggtatattttaatctaatatagttactactagtatataataagtactattagatctcctacttttatattaagggtctaagattctattagattataatatataagataaaactagaatactaattagctattaatcaattcgttaagctagtaaggaactaatagaagctactaattaaagctttctactataataataagctattagctagaaaaatattagaatatagcttaataagtaatagtatcttaatctactatactctacctagctatattaagataaatggttatatagaaaggtctagtagaatgattattacctatatataaatactcttaattaaaggaaagcttcctaaagatctatagctagaatttgtaagtatagctatctagttactaaactatatactattatatataactaataagaaccagtagatagtactataggaagaggtataaaaggaattcggtataagtttactaaggattaacctagctaatattaggttatatagaagcttagtatactactatattaagaagtaggtaaaatctaataagatagttccttaagtagagattagcttcctagtaggctatcttacctctaatatttataaaatctagttcctatatactagtaaagttagatatattagggatatagttattaataagacctataaatatatactaatatataagaggtattaatagatcctactaccgatagtagaggaactataagagcttattaataaagaaattatataagtacttaattataagattattagctagtaggtagctataatagatactactgagatatagtataactttaataatagcttctagtaagctactaaacctatcgaataactataggaagaaatataggataggatataagagggagaagggtagtaagagactaccctgaattaggggataagctatataataagcctactaatacctaattatctatttaaagccctattagatatatttctaaataaactagacctactactactactagttatactactagaagaagctaaactagatactagctctagttagagggtagatactatatataaaatatagtaagttaactagacctagctcctaaaaactagtaaactataaggataatctaaggataagctatataataaactagaaagatagctttaggctaagctactagtactaagtaggtagattataggagatattaataaaggtaatataataattagaaagtatatatatataaggaagaactttacttatactaccgcaatagtaaataaagagctactagccctcttatatatatttatagctagtctatatatagagaagctagatacttaatactatagagataatcttcctctactactaaagtactagaaagatattatattataccccttttaagaaggtttccttatagtaataagaaaagagattaactcccttactaaaaaaggaatatttaaagttattaataaactaaaggataggggaaagtaaatactacctctattataggtctttatatataaattcgactaagatagctatcttataaagtttaaagcctatatttatatataaggtaatctcgaaataatctcttaagaagaaaagagagctataatactagtagtaagaatagtaaggataatctttatactagttactacttttaatctagatctatactagcgagatactataacagccttcctaaatagtaaactagatagaaggaaagaaatatatatatatatactagagggattttagatccttagtaaatattagaagttattataagtattatatagtttatagatcttactataactttagtaataagaagtagtaagtatcttatataagttagggcttaagtaagtccctaaagatctatatatttttattagaaaaggactaattatcttcttctatatagataatatcctaatcgcctattatatattagtaagggatagggtatactaattagaaaaggatcttaaaacctattaggagcttatagattatagagaagctagttggtttcttaatatctaaattatataagatagatagtagaagaagctatagctatactaagatagctatatagtaagtattactacttactataatttaattaactacctagctatctatactctactataggtcgaagaactaaagctatactaaggtattactatacctagagaaatttatctctactagtagaaggtaggaatcttagctagctatataactattattactagactagatatagtaaaggccacggcctagctagcctaatttcttataaaccctagcctatagtactataaagtaatcaactaagttatttcttatctctatactacttataacctagtaattaaatatagcgctaatatagtaactactaagatagattctatataatttgtaagtaatacctcttatagagattacctagattagaaaagcttagtaggctatatttactaagtatatagagggctagttaactagaaagctactaagtagctaatagtaataatattaactactaaggctaagcttctaggcctatctaaggtcgggaagtagctctaatagtagtaataactactagatactattagctttatactatcttatactcttacaatcagctgcgataataagtatatagttaacctaatataaagcgaggatatagtatataagataaagctctgatatatagatatctattaccattagcttcgataagaggttaaggaaggacgaatttatataaagtgggttactatagcgaatatagtcgctgatagactaactaaggtactccctcgctagaagtataataacttcatcagaatgctaaggatggtagatataggccatctggtataggccagtaagtctatactaggcttactaagggggtgtgtcggagtatgtaagtcagtataccggaggataccggaggatctattaatcctaacaatgtgtattgtttattttagtttatgtaatcaggctctataaattgccagctgagctagttcagaaagacagactgattgacacctatttattggaccatatattttatggatatggttaatccgatagttatgagcccggtttacaccgaacgagactactagtgactaattgctatagaaagtgtcttacgaagccctattaaactatctattccttcctcccttaacgaagctatatagttagctatcacttactactactaatagaagtagtatcaatcctctccgctataaagggcgaaaaactgaaagatataccctaatagtatatctggtatactaaagtataactttatactacctaaaagaacgtctgggatctatataacccagataccccggtagatactaggcctactatccttactaaactagtagaaccagcctaccccttagataataacgataagaagctttgataagtttagtgagacttaatagacttatataagataaagtatactagataggagaaataggctaaaggattaagtaatataaacgaatatatccttacctatcttaatcctatataccatctctctatcctactatatataactctatataagagactagtctacctaaaagctcgcttcgctaagttaacagtatataaagaagagatccgaataaactagaagttattcgctatatagaagctaactagagatattaaataatagctctaaaagtagaacttactaagggagtaagctattagcctaggtattagtaatagcgatactaatagagacttcctatatatagttaaggaagtactactaatctagtagtaaggaaaatactaagaagtagttatagataagaagaaatataatacttaagatcttcttaaatctttctacgctataaactaggagattagggttaaaactattacctctactaatactctgaaaagtaccttctcgacttagtaaaggaatccagaagctaagctagataaagagaagtaagagaaggaaaagtaggagaacttagaagtagtcgaaactcccgtttaagtaacgaaggtatctatatagctataactacctaaaatatcgggtaataacctactagattataaataaagtggcttaactagagggttttatactaagtaaagataaactagaaaaggctaagaaggtattagctaaagatactacctagaagtaataggttaagaaaacggtagtagaagcttagataaaaccttagtaagctctttagtaagttcctctataagtagaagtaaagccttaataagtggtaaataccactatctagactagttttactatatttatatactatagtctataagctaacgtaattcacatacgagccgccaccacatacgacccgccaccccattcaataatcgtgaatttcactgatgccgggacccactagaattccgtcgcagcatattgatgatgctagcactttcttcatcgtgggtcatagctgccggtccactaagctgtcgccgagttatcgctaacaagtgacgtagcatcgcctttatagtggggactaatttaaaaaggacaatgctgggtcaacgtggaaaaatattttgactacggatatctccgtggcattttagcaatgtatgttcaagccgttcctagcgagcagagtttttctctcgggtttgttgctcaatgctatgcataatttctaccagtttctgtgcgtcgtctcgagtccgttccatcagctcattctgttcgctgatccattgcagtcgttccttccagaaatcccaccgctccttcgagaacgatgagtctcctttccatagattccaatcgggctttttgtttgcttcagcaagggtgaggtccttctttcctacaaacttgaaaataatggaccctgcaatctcaaaaaaaggaaccatagcatgaacatcagtctataggccgaagtcagtatctcaagcacagtgatcatattcttttgcgacccacattcagcataaggatgtaattcgtagccacgcggccatctacaaggtgatagcgctgtaagagcgacggcgagggcggcggaagtggcaccggcccgtgtttccacggctcctgttctaatgcaaagacggggattcgcaatgctatgcttagttcgcgtgaaccagggccatgcggtggatatgcggaaagataatgcgcgcaaaaagcgctgctactgtgaaaagtgtaccacccttcaaaagggtagataccgtatcgcatttcccagtaacctgtaatcagaatattagcccctacattaaatcaacataaacgaccctctggaaggaatcttgggcgaaagccttgtgtccaaaatattggagagaatcaaagaatgggatggccattttgcatgatattttaggggaagaagaagtcacgcacggtcatgagtctcttcccaaatgtccttgaatacggccaagttcctccagtcttccagccgatcctggaagcgtgacgtgcgaacctgttcttcggttctatcaaggtctggaagagctcttattgcctctaccagcttcaaaatagcgggttgatagttcggcatctcaatagcagcatcccaaagtagccatgaaacgcgctcccctttatccacagcttgactctggcgctcttgaatcaggtcatcttcgttacgaagtgacatgaagcgatgagcagcgtcatctactggaactgcattggcagtgccgtaacgctcaacaaattcctgcaatatttgaatctcatcccaggttgggggatctgggtcgccatcctctgggtctggatagaagaagggtttccattcggctttgtactcttccattgttgtgatggaagttgtggtgatttgatctggggtcgccccagtcggttctgacaacgaaggcgtactttcaagtgaaagtgcttaggaacagatcgctttttcggggcagtatggtcatacaagagacaagcaaaggaggcttcgctggtggtcagacctctggaatcctaagttgctccacaatggatgctcttagcacccatatagtgtcttatgtatgtatcagcgaaaaatgctggccaagaagcgctatagccaaagtagttaggggtggattcgaaaagagatttgaagagtatattcgatttcgaaatcattttgcgatgtcattattcgcattcgaaatttctattcgaaaagttatgcggaagtctgccaagaaattggttacgtaaatgattggttaacgccagcaaatccacccgtgatttagcgtcgtcttgtcgcgcacgttgtgtataccaaatcctccttacatatggatctcgtaatttgagactctagcctgtggatcttctcactatggttgatagcagtatttattttccgcctacaatagataacagctcatgtactctcagtgtcattccagctgtaggttggcgcaacacagtaaacacttccagccttcaagctatctgagcattttcccgggtccaaagaagggtttaccatcgtgaagaccgcatgtgtgatactatactgaccacatatacccacacaactatctccactcttggcctcgtaccatttgccacaattccttgttgttcctgtcgccagtgtcgcatttgcaggtggctcgaccttgctatacacatatccattcgattcagagggagcaacgccaccaccagtgctgcttccattgtgcatgccgccctgtggagagagacaaatggctgtaccgtagatcttgcttgctggctgtagattgtcgcagtcgtatgagacccatgggttgtatttgcgtacatcacgatctttcagggagtacgcgtactcgatatctgaacaattgtcgctgggttggatggaatatgtcttctcacaggttaggggaaggcagaatttgagtcccgaagagagggaactgcagtcaaggatctgattttgatttcccatgtacaatgccgctgaagaaatgctcgtgtcttcggcgatcgatgtgcaagtgtcgccgtccacggtggtgtagaaattatccgatccgcagaattcagtttccttttctggggtattgcgagggatttccaggactgtggtcggggcattcaatccgcaacgcttattgattgcttgcaggaccgtctgatagtagtcgtcgtacgcagagtaaggggtacgttgcatcatttgaaggcgttcggtatagcagtaagagcatagctcgttatcaggcattgctgcagtattagggaccaaggtgaaatcatcaatgacatctgtcaacaccggttagatgagttgagtaataattagaggtgtttaacgtaccattgcaatacttccctaagctcttatccttactgcatgtttcgttataagcagcccaaatgcgaccaccgaacatctccgcaggcgttccactgatattatatccggcacagttaagttgcaccgattgataccatgcctggaggttctgaccacaagtcgcatcacaaatcgactcagtcagggtatcgttattcagagaaccgtgatatttggcggacatcattgagttcaagactgggtcgcatttgattcgttccgtcatcgccgactggcaaccgattggaagatcaagaggttccagtatagaggtgctgtagatactaaacccgtcgaattctctcaggcccacggtttgatttacaccaccaagccaagcaagaatagacaagagaagaccattcatgttgtccttggcataagtgggtgttcccttgtaaggtgtgatcatctccacaatagccctagtgcaaagattatacacccaaacatcggtactttgttcaaccccgaaagcccgttactgacagtcattcgtttcgaggcagtcttgggagtaatccgaaaaccagctatagataccagtgccaagcacccaaatagaggaggactcgacgatgcgaacaccccaagataccgcacacttggttgaatcactcttgcaatcatcaaaattcgggtcattgacaaacatgcctggtataaaggggactagggcttccggcgagggttggtaataaggcgattctgtctgaatcattcccatgagaatattctgcgcccccgaaagctagtactagtagagagtactgtgttccgatgcagtaccataaagccatgccagttgactctcgatcagaataccacgggctgcgtaaacatcaatctgatcttgggaagagacatcaaggtcatggtcagccacccagacccagatgttctccaggtaggccgtggaagatgaagtcagataaagcaaaagagatgcagcaatacaatcttcattgacacttcccgtgttctttggacactatttgttctagaggttcgaccctacagcaccgccaatgcggatgtgagaatcccacatagcagccgatcccttcactgattgctcaacattccactctacaagaatcgcacccgccgtagggccagagactatgaaaagtagatcttgaatttccactatgccaacgtcaccggaagcaccgaccctaacggcaactcggggatcctccgcatctgcaaaattagtaccagttgccatgatctaagaccatgcctaacccataatacgtgatccaacaggtacatgcaatgtatcatgaatcatgtaaacaccgtgtggaatgtatacaatagacgaaagattcgcagcataagacaaagcgtaattgagaatcgcagtgtcatccgtagtcccgtcgcccttggctccaaggttcttaacattgacgatttggtcggctacgagagtctcatattgaggtcgacgacaagtgaagaggttagagtcaacataggcttgtgtccctagtagctgagtcggtcgcaaaatagcagggatatcctcaccatcagcaaaggatccaactccagatacatcgctgaccattccgaaaccccatgaagctttgcggacctcatcaccaccagcaagaagaattttattctgaacggaatcaatgattgcggtcttgacgttgaagaatccgacattttgcaacaacagagaagtcgaattttccgcatgaagtgaggttatgattccattcggggtattggcgatgatggcatcagtcaagatgagagatccaacaccttggcccgtactcgaaggtcctccggcctatctagattagcatgacttgccaaatgccattcagctattttgtctatgactcactccacccacaattgtgagtccattcatgcaagattcaataacgtagtcctgcatggtccacgcccaatcccaatgaacctgaagagcggtgttgcagttcacgaaggtaagctgacttgaagtgaactgttggttaccaaagtaagcactatgcataattaattagaccccattgatattcaaactgcacaagaatgtcattacccaaagttgcctcccacaaacgtaaggtcagctagaaagcctccagatccattctccatgtagattccttgttacgtgttcgacggaacatctgaattgtataccatgtaaaattctatgttttccagcgacgtcccttgcgcaacttgccagtggatagcacagatgtatgccgaggggtcagttggtctgatgtcgattttgaagtttctaacgctgcgcaagaagttgttttgattaatataccactcttcattgtcactgacatagacatcggaggtaatgacgcccaggccaacgaaactggatgcagccaggatggtaggaacttcgaggggctggtggctgtcagtgattaaacagcacaagcatgcagaacaatcgctcagcagcattgctcgaagaaacttacatcacccaaaaactcagtattatagtactgaatgattggcgagctaaccaggtatgttccggcaggaaaccagactgtcgcagggtagatagtacttgatccacagccgaggccgcagcgtccaccgtccgagatagccttgttgatggcctctgtatcgtctgtgacaccatctccgacggctccatactcgcgaacatctctccatacctattttgcgtcaaacttaaggaaattaatgagaggggaagagggcgggtactttataaccagctggagcaaatgcactttttccattttgttccatcgtagccatccagtacttcgaagtactagctcgcttttggattgctccatgggttgtatcattgccaaacacgatgtcatcggtagtaccggtcgataaaaagtcactcagaccattcgaatgtaccaaggcctggcttggggcattggtatccctgcgaccctttccgtacttattgcgaatctgggaagccacgagactgtgatttccagtcggcttgtttggagttgactcggcgacaattcgagctgcgcgggccagctcagtcgggattgaatatgccttgtttccgctggacggggtagctgttgcgtcacggtggatgagatgaggactttcaactgctttaggactatagcccagaggcgtggcagccaatttggagttcttttttgctccctgtgatttatcaaacgccaaattattaaaattggggttcgatgttcgatctttgttgacttttgcgagagctgccaaagcatctttcactatagtcgcggcatcattgctggtagcgttaccatgactccggtggtgaagacttgtatggcggtggtgaatattatgatctgccgatgcgcaagctgcgaagacaaaggcaattgtcaagctgaagatcagacccaccgatcgcagctgatgaaccgccgatctcctgttgagcttcatcttgccagcaacattcagaaactcgatgctgaagggatatgacttttgggctttctgtgagcgagaatccggtcatatgcgattttagtctaggctcactttcgtcggttctcttattctgggggccgaaaaaaagccagaagcaatttccgcgatgcgaccataaatctactagtttgatcgcggacccttcggagatgcccgtgccaagccggccaagacctgccaaaagcgcacaaagtagggtccgatctccactttcagttcttagttccgccctaaagcatgtcgggaccaaacgatctcatcgtcaacctcacaagggccttggctagttgattcggtgtctcagttgcattcctcgccgctatcgttattttcttggcaaatgcgctattgactaccatttcatcgctaccaaaatatgaaacatgttcctacgaaaatgtcggtcgttagcgagtggtcccaatatttaccttcggctagatccttccgaagtgggaaaacaaggtaggccattggtgagaagtatacgctagatggaagcgaatcggggggccaaaatatcctcatgcaacatcatttcatttagtccggtggcgacccgggggcagcagatcttggctaatataattttgataaaacagaacggagaatcatattgccttaatgagctcccagctagacttgatacccaccaagagataatatcctccagtatctctcctgctatgctgggttcgttcagccagaaatgatcaccatacgcccaactggaggagccctcctttggctccttttgatctccttctgctttatatttaccagtgccaatgcacaagattgcagtgctttgaacacatgcgctactggatgctgcaacaaaggcggatactgcggaatcggtgatgattactgcggttccgactgcgttgcgaattgtgattacgagccagaatgcagtgtctcgaagccctgtgcaagtggatgttgcaacagctatggctattgtggtctgggaccagactgtgagtttctcaatcctctaaaacctagttaccgtgtctttctagagcatatttctgacatgaaatttcagtttgtgccgataaggtttgcgtgggaaactgcgactgcaaggcagagtgcgatcccggcaaatatggtgactatgcggaatcttccaaatgtccattgaatgtctgctgctcgaagttcggcttctgcggcactaccgaagaattttgtggcaagacaaaagtcaagcgcccttcctgtgacaaagatggatctctcaatcgagtcgtagggtactacgagggttggagtccttcacgtcgctgtaatacgttctaccccgaacaaatccccgtgggcatctacacacacttgaattatgctttcgcgtcgatcgatccagatacattcgagatcgtcgcggccaccgagagcgagaaaaagctgatgacgcgcttgacggatcttaagaaggtcgatcccgatctcaaagtcttcattgccgttggtggctggactttcaatgatcctggagccacccaaactctgttctcggatctcgctgcgtcggaaagcaatcagaagaagttcttcaagtccctccagagtttcatgtccatatacgactttgatgggattgatcttgactgggagtatcctgtggcggatgaccgtggcggtcaaaagaaagatttcgacaacttccccaagttcttggccaatttgaagaaatccctcaagtctactggtagccgcgatggagtcagcattacactgcccgcttcttattggtatcttcaacattttgatatcgcaaacctacaaaaacacgtcgacttcttcaacatcatgacctatgatatgcatagaaaatgggacttaggcagtgaatgggtttcccctatgctcgactctcataccaacctaacagagattaccaatactctcgatttgctctagcgaaacgacatcaagtctgataaggtcgtcctgggtcttgcattctacactcgagtattcactgctgctgacccgagctgcatggagcctggttatttgtttgtttccggtggaaacgctaggaaatgcagtcaagaagttggcatcttactgaattctgaaattatggacatcatggataagcagtccctacagtccacgctggataaggaggctaccgtgaagattctcaaatttaacgacaaccagtggcttacctacaaaaattcagatacatttaagctgaaagccgactttgcccaaagccaatgccttggtggtgtgatagtgtgggcggtttcccatgatttaccccaaggtaacttttcccgagcccttagagatgccatgggccgagaagtgaagtcccttatcaacagcggtgaattagcatcaatagaggtcaaaaagacccatccgcagtgcaagtggacgaattacttcgacgattgccctagtggatggtcgcgggttcgccgtacagatgacggtgcccgtgaaggcgagcacatatgggattctaccgcatatagttttggacagcatacgttctgctgccctcctaatgccgaacttcccaaatgtggatggtatacccataacaatggcaaatgcaattcggagtatccttctggctacactgagattggatccaacatacaatactgttctaacgactttaacgactaccaagctgcttgttgtataactgaaactcccagtatgaaactttactccaagtgtgactgggcgggaaaaccacggaaatgcgacgaggaatgccctagtggcaagtccgaggtggctctgtcaactaccggcagtggtggtgtatactgcgacgttacttctttcaaatacacaatgaacggccaagagggcacaagttgggaggaacgcagctactgctgtagtgaggaagacgatgttgaatggagtaaatgcgaatggcgtgatgacattggcctgatgctcgacaaaagctatgttgacggttactgtctccccggctgtccggatgaatacgtgcgtgtcgctattgatcaacacggtggtggttgcaaaggcgacggtggccgagccaaatgctgcttgccaaaatattcaacagtcagcaagagatcatacaccacgcgggaacagagtcttgatgacttggttaaagggttcatggatgatccgagttgtggagcggacgattacaacttgaagagggatctcgcgggctttgaatattctgtgggaaatacctctttgtccgatctgtctggtactcgaactccaacaacacttcaacgccgctcaacaaccaaacagctagatgctatctatactgttgcatacgcccttgctgtgcagtttacagttaatgcagcctacgaagagatctggaaaaaacgtgtgctgccatcatacccacatcttacagtcaaggctattcgcaattacctgactacgtctgaggactgggctgaaggaggtataagttataaactagagaaggttctttgcgccccaagcatcttcgacagcaagtttgcagaaagaagcattgtctcctgcgcatgcgaaacaagcgattgctgcgatgcaaacgacccggattcctgttcggatcttgacggtgatgatgatgattctactgctcttagcaaaagagttttagataagagagcctcgcgaacgttcgatgtcgatttatcagacggtggagcgcatgctacgatcacttcttggacggtattaatcttcaagtcccaatcaacgtatttttagtgctaatcagacgatcagtatatcgtgcgtggcaacattcgaggaaataatcccatcttggatgaaggttatacctacgatgacgctgaggactgcctcaatactcaaatcgctttgatgtcagtttcgatggcgaatatcggaagatatcagggtacgttcttggtgaccttgtttaccctgaaagtttactcaatttactaattaatcaagtcgaacatgtcgttgagttgaacaccgttgcctttttcctgagagatgcagccaatggggtcctcaggtctggtggtgtgatgagactcggtcgaatttcagtgaccttcgttagacaggctctgatggcgccagttcttaccaacccaccagtaatgactggtgccgaccaatccttgactcccatgacccggattatgcatgctttgggtagcctgaacaaccaagctgatttcaaccttttgcttaatcgtttgaacaacttaaaatccagggtatttgatcatttacaattttttttttctggagatgaccaagttacttatcatttcttttctctagctctggctttcaaaaacactcatcgctgatgaaaaaatggagaaagcaatctcagccgatgacccgaatcgcgcattgatacatctccgcgagcccctcactattatttcctatctcaaccatctcagagtccagcctgacatgatcgacacttttaacacaattcacgtagaattcggtcgagcagatacgtactgggtgaatgctggacatccaaacccgcagtcgcaagccagatgggatgaatgggttcctgacttattagatagtgccactcagaatgttcgcacgtttgttgaaaattggggggatcagatgtataggttttgggcagtccggactggtgataacgttgcgcaaacgctcgagatcattatgactttgcgaagacaggctaaatctgcgaggattaatccgaatggcctggattgaaaatatcaaatgactagttatatacaagatgtagttagaagaaaaatgaactgaatttatttgagcagtgggacatgcaattcaacctctcatctttcacccatttgtagcaccctccatatctaaagcagttggtggcgtatatactgaattgagtagctcaattcaccgaatcaggaatctctcttgcgactgacttagtgctttattggtggctgtacggccttttccatttgacctgccctgatgccggctccggagctttcaccttgacacgccaaaatgagaggctgcggcctgaatactattaaattggcctaatttataagctttgagggcatccaaaaaaaggatctcttcttgttcggagaaaatcgggattgttttggtggtaaaaggggctcttggaaccgactctgcaggttcttcaaacactgcaactagggaagctccgtgacctgcgtatcttatgcagttttggttcgtagttctaagtattcgtcttacgccactacacagaaagaagaaatagaagtcaaacagattaggcagaattcaacgcaatataataacatttaacgaaaattctgtcttttctataacttttgatattcatataaatcttcctctcttcgtatacgcttcggaacccgcccagatatacgcctgtgggcacagcttttctttgaaagaggtatcctgtcttgttcaataagcagggtactaggtatggctgttgctgttggttcgattcttggtctcttgccaaggacactctcgtcggttagctgattccgctcaaatgttgtatcagggtagtcctcttcctcctcctcattatcgctcatcagatcgaacacttccttttcataactatgaccttgccaagtcgatttgcccgcaaacgactctggtgccccctaagcccccaaggtcactagtagatctcagcatctccagtcagggtctaacggtccctttaatggacagaatagattacctaggtaaattcttggataaacaagatccagaaaacactgaaagagttgaaccaacaaatagaagcttccgaagatattagcatgctggttggcttttgtttctcaaccttagaaaagggaagacttcgctacaacattaagaaaactcaaagctaatcaacagaaagccccaaacaattggcgaggtactgcgcactccgcactccgtacactagggcaaactcaaagattgtcttggtaaactcggttggggtttcaaatgttggcttggcagcacgtgtttggagactcggactttccctcctctcttctccactccctcaaatttcacgcgaacatcagttcaacatggacgagctccaaaatagccttggcacttacccagactggggatatgtcatctatcgcactacctactctgctgaatcggaaactctattcccagtcgctatcaggtacattgaagcctgtattaagagatcattcctccgagaccacaaagaagatcctacaaataaacccaacgaaatttgcgccaaataccggtcgactattgtgcaagatcccgcggaattcaatggggcgtctctcgaggcaattcgcgctcattttgaagcgtgggtggaatctcaaggcatgcgtgaccgctggaccaaatggcgaatgtgcatgattattgatgaagaatctctgcaaacactgaaaggtacatcagcagaggcccttgaaaatgagagcccataccattccgatgatgagctacgatgtgtaaaggttcttgaagcattcccggaaacagatcagtatgacacctttccggggtggatgagatgttggacacggtgtctttgggatctctggatgatgatgggagatgctagtgagatgaggcagttatttgacggcattgatgattttccatttgagggggtgtactgcggataattcaaagctgtttcggtctatggcattagagatatgtgattctcaggttgtggaaaatattgttcgacgggcagtcaaataaagaagaaacacatttttcattcattgatcgcgataatatatgattacaacataaggcccactgtgattgcaatccacatgtttaaggtaaacaggagtacgaacagtagctacattcgtcaaagaagatacgggatcggacattgataccgattagttgggaggcttgcaggtttctgtcaaatttaagaactctatccttttttctttgcttggctgttttcacctcgagtaaacgtccaccctccctgtcttcagtagcagtccggccctccaatgtagccctacacaatagtgatgcaccataaacgccatcaagttacacgtcacgcttataagccggtggctccaggaactagccaaagttccccggagcaaagtattgttcctggaggatgtttagctcccagagctggcctatacgttcctgaagtcgatagggcctgtgtataaaactgtctctcaaatcctttgactcgtccttgaaggaagtcgatcccagagacagccccattggcttcaggaatgtacaagctgaccctgggagcttgtggatacacacattgatgaatacaaactcttttgattctccgttcccgggcgctttcccttattattcggtcttatagtccctgtatgtggcaagccgtttcgtgccgccagggaataccttgaaactgctaagccagaggcatgctttcaatgcttcgcaagtgaagggcttccggacaaggttcgctttcagatgtttcataaccccgggtatgttgcgccacttcgatactattcaccttaaagaggaaccactcaaatgcaactggtatgaagtaggcttgctacatcgaatggcttcctagcgctatgcttctgatatacatcacgtgcggagtcgctggccatgctcgaatccgatgcagggacttcaaaaataagaatagatcggctataaatcaacgaagccattgtctcggtatcggaactacctgtgtgaagcagcacaaggatccaaatgttaggtaggagtctgtgataaaagaccgctctttattaattctcgggattggcctgatagcttgggaagtggattctaagtctgtcttcgaaccaacgaagtccctgtacccgactcagcacttaatgttttatatatgctatttcagttttgtgcaatctaatcgggttgcatatatatatacgataaatcacgtaaagtagtgtccaattgtctcttagcagtagcctactcgaactgttggctctcgggtatataatgagccttgtgccctaactctggcttagtcagacttctactttcctcctacctggtcaacctagtacctaggtatacgtctcttcttttcaagccacgataaccagtccgttaatgtgagacccctaggtatggaatgcctaagggaatgctgtatgtaacggaggatcgggaaatagagatagtgatatacgcagtggtatattggaactaatagctgcttctctaaagaagcagcatgcgaggataatatacaggtttgtgggtcatatgacctaaggaggctgtgcaggcagtacgcattactcctgtctagtctatagtcccctacgcacctaggataggtactccacgtactatgataggtattatatttcaggtatcagccttcttagtattggggtcctgataatatccccctccttgtggtatacggtccccgtaggcttagaataggagaagaacaaaggagtagcttagtctattaaaacccatatatctaaaaaacctcgcagtaagggtaaaaaggtatatagggaaaggtatctagcctcaatactccaaaaatatagaaaatgatataatagaagtataaacagagggtatagttgtgagacccctaggtatggaatgcctaagggaatgctgtatgtaatagaggattgggaaatagagatagtgatatacgtagggtatattggaactaatagctgcttctctaaagaagtagtatatgaggataatatataggtttgtgggttatatgacctaaggaggctgtataggtagtacgtattactcctatctagtctacagtcccctatatacctaggataggtactctacgccctataatagtatgagacccctaggtatggaatgcctaagggaatgctgtatgtaatagaggattgggaaatagagatagtgatatacgtagggtatattggaactaatagctgcttctctaaagaagcagtatataaggataatatataggtttatgggttatataacctaaggaggctgtataggtagtatatattactcctatccagcctatagtcccctatatacctaggataggtactctataccctataatagggcttataccttaggtatcagccttcttagtactagggtcctaataatatccccctccttatannnnnnnnnnnnnnnnnnnnnnnnnnnnnnnnnnnnnnnnnnnnnnnnnnnnnnnnnnnnnnnnnnnnnnnnnnnnnnnnnnnnnnnnnnnnnnngttatttactcgcgatttctaggttataaaagtaatctctaactatagtatttacttttagttataacctttactattataattaatcctatagtaaaacctatcttatcgaagttataaatattatctagattaattctatactaaagaatggttttttaaactagattaaactactctctaataatccttaggtctttatatttcgtatacttataattataatatcttaagaatcgggatataagggtagggtactgtttaataaaatatataacctatgttatatgccaagtcgtttaaggaaagagtgcatttgtgtcaaaattctaagtataaggagagaagaagaaaagggaaaactatctacgagggcgttcctccttcttatatccttcctgtttgcttgtttgcttccagtgcaaaagctcgtttgcccttctgagaaggaataagggaagtcgctcctacctagatcgttatataacccccagctaagaatacatttagtccctaaatacaggctttctattattaacgtggttatctaatattctgtcttcttccgctaccttgatctattcctatagttatattagcggtcctggttttgctaggtaggccttatggaattccttgatcttatctggtatattccggaagttacctactagatactattatagatctaggttgtgtcctagctattaaaccctatactataatttctagtagtaagtcctaacgttaaggattttttctacctcctacttattagttttaccgatttatactagtagcggtaggtctagatgctgtcctagtaacagctctgttgttactactttctaaagcttacttagatagaaaatcgggtaaaccttaatagattccggaagtttaaggtaataagaatatcctactttcttaatgatcttataaggactacttgctaaataggagagctttcaactaggctagtcttactgctaatcctttattgttataaatacagaatcgcctatattaaaatccttttcttagcgatatttatttacttattagatctataactgctaagactttttaatctgattttttatctctgtctagatatcctaaaggtaggatagtatatctattacttcttacttattctaggttaaagtctctcggtccttctaatcgaaagatatagtaggtttatagcctctttcgataaagaatagggacttcttagttatatcttaagggagtattaatactataaaatctactattagtaggtattctaactaattgtcctagttctattctacgtagggttataatcgctgtactatatactagttagtaatttcactttatctatttatctaagggtaatatacagtcgataactttctttttatacctaggattcgatagaacttagtctagaattctaagataaattaacctccttaatcagagataattatatttaggattcctataatctaaataatataatctataaataggcgtactatagcttttatatctatttccttctaataaggaattaatactagttgcttacttaaacggtctactactataaatatagtattatacctatagcaatcttttaggaaggatctaaaatctattgtaatatattactatagttgttctagtactagtaggagatatagtagtcttagagtacaatctctctatacctttattcttttataaatcaagtagttatcgatataatacttaatatctgttacctatcctagctaataatatcgttctaatactaatttctttagcttcttaattcctaggtatataattaacggctgttaatatatcttattaagaagccttatacgaagatctcctttattaggaaccttaagttagttcttaaaaagtaatagtctattataaagcgtctactttagattacttccttcgatagctatctatcggaatggtttaaatttagtattttactagttagcttattttacgcggtttataatcttaggatcttctagttcgatcggtaagagctctataggatatatacctttcttaaggtattttttaggaagtatagtaaactatcgactttagtctatatagggtaactccttctaggagagtatattagtaataatattcttctttcctagtcgatacttaataataaagtagaactataagaggaactcgctctactaggcctactgctaatttatctgtcttatagttataaagtattctaaggattaataatctataatgatttcgaaacgctcctttctagagaggccttctagctctagttactactcttataaggtatagataatagctaataactccttatcctatactttatagttaagtttagcggcttatattatttttaagaagaaagctataggatactaaaagttattgttattatagtactgtattaggactactcctaagaccctattcgaggtatctgtttccacttaggtatagagttttagattataatagtgtaggattagagcctcgactaggcttttttttaacttttagaaagtatctttatattatagtgactaatagtagactatatctctttaagttaggtagtagagtggcttagaaatagtactatatccttagataaattgtctgtagaagttatagaatctaaggaaggattagactccctttactattatagatatcttctattactagattatatagatctttttaggatcgatagctattccttctatattaacaataaatcctaagaacttagtcttagttatagagaatttatacttaggtaatataacctatagacctactttctagagttaggagaatacttctcaaatatacctctaatattcctctatagtatcactatagataaggatattatctataaataccatagtatacttatctatatattcctagagtatattatttataaaatactagaaggttattagcctatttattaatctaaagggtataaccttatatttaaaagatctatattatatatagaaagttgtaagatcttctactctaggagttaactagattcagtaaaatccttaatagatatccagctttataaagaacttagctttactagttctttatagtactttattaattagaggtagaggataataatccttctttaaaatactatttagttatcggaaatctatatagaattgtagacctcctttaggcttctttactataaggataggcgaagcgtagggggtagagctaggtataataaatcccttcttaaggttatctataatatactacttagtagcttttaacttattaaataataacttataaagagggtaatatcctggttatatctctgctttaaggataatattgtggtctacccctatataataaggtaggagtttatcggatttttgcttagagaagacttctataaggttatagtattcctataggagagttcttttaatttctttaacctctatatcctagactatcgttaatttaatattaagaatataatcgatttctataagagaagttaagaatactttaactccctttttagtatttatctttatatatagtcgattaaatcctactctgctaataatacttatattaattagtaagagtgtctcccttagttctttttcttaagtctactagactaggatagggggtatcttattattaaggttctatattatcttccgctactccttaacttactagcggctatactaataaatgtaggcttatagatagggcttttaggtttctagatcttattgaggtttattaaagaagtagtcttatctctcaatatttacttagtaatctttgtttattaccttattccttcttagaatctaagtagatattagtatagtaagtttacttactactttatcgaaaagtgttccctattatagctagattattcgataataataacagttaagtagaatgttatattctgtaaactatattcttcctagtattaaattatactatcctaggtctataactaatattagaacttattattagatccttctatcgatatttaatataagtataatagtgtaggtaattaggtatactagttttctattaaatcctctaactaggtacttctaacttagcttatatatatatagactaaatttctttctaagtaatacgataagggtaatattaataaagatagatctgtctgctcttatatctactaatactttaattgaaaaggaacatctattatatattaagtttatattaaaaactaaactatttcctagacttcctaaaagtttctatagattaagggcnnnnnnnnnnnnnnnnnnnnnnnnnnnnnnnnnnnnnnnnnnnnnnnnnnnnnnnnnnnnnnnnnnnnnnnnnnnnnnnnnnnnnnnnnnnnnnnnnnnnnnnnnnnnnnnnnnnnnnnnnnnnnnnnnnnnnnnnnnnnnnnnnnnnnnnnnnnnnnnnnnnnnnnnnnnnnnnnnnnnnnnnnnnnnnnnnnnnnnnnnnnnnnnnnnnnnnnnnnnnnnnnnnnnnnnnnnnnnnnnnnnnnnnnnnnnnnnnnnnnnnnnnnnnnnnnnnnnnnnnnnnnnnnnnnnnnnnnnnnnnnnnnnnnnnnnnnnnnnnnnnnnnnnnnnnnnnnnnnnnnnnnnnnnnnnnnnnnnnnnnnnnnnnnnnnnnnnnnnnnnnnnnnnnnnnnnnnnnnnnnnnnnnnnnnnnnnnnnnnnnnnnnnnnnnnnnnnnnnnnnnnnnnnnnnnnnnnnnnnnnnnnnnnnnnnnnnnnnnnnnnnnnnnnnnnnnnnnnnnnnnnnnnnnnnnnnnnnnnnnnnnnnnnnnnnnnnnnnnnnnnnnnnnnnnnnnnnnnnnnnnnnnnnnnnnnnnnnnnnnnnnnnnnnnnnnnnnnnnnnnnnnnnnnnnnnnnnnnnnnnnnnnnnnnnnnnnnnnnnnnnnnnnnnnnnnnnnnnnnnnnnnnnnnnnnnnnnnnnnnnnnnnnnnnnnnnnnnnnnnnnnnnnnnnnnnnnnnnnnnnnnnnnnnnnnnnnnnnnnnnnnnnnnnnnnnnnnnnnnnnnnnnnnnnnnnnnnnnnnnnnnnnnnnnnnnnnnnnnnnnnnnnnnnnnnnnnnnnnnnnnnnnnnnnnnnnnnnnnnnnnnnnnnnnnnnnnnnnnnnnnnnnnnnnnnnnnnnnnnnnnnnnnnnnnnnnnnnnnnnnnnnnnnnnnnnnnnnnnnnnnnnnnnnnnnnnnnnnnnnnnnnnnnnnnnnnnnnnnnnnnnnnnnnnnnnnnnnnnnnnnnnnnnnnnnnnnnnnnnnnnnnnnnnnnnnnnnnnnnnnnnnnnnnnnnnnnnnnnnnnnnnnnnnnnnnnnnnnnnnnnnnnnnnnnnnnnnnnnnnnnnnnnnnnnnnnnnnnnnnnnnnnnnnnnnnnnnnnnnnnnnnnnnnnnnnnnnnnnnnnnnnnnnnnnnnnnnnnnnnnnnnnnnnnnnnnnnnnnnnnnnnnnnnnnnnnnnnnnnnnnnnnnnnnnnnnnnnnnnnnnnnnnnnnnnnnnnnnnnnnnnnnnnnnnntatcaaaattctaagtataaggagagaagaagaaaagggaaaactatctataagggcgttcctccttcttatatccttcctgtttgcttatttgcttccagtgcaaaagctcgtttgtccttctgagaaggaatgagggaagtcgctcctgcctagatcgtcatatatcctagtatcttcttctcttctttaacctcttatcttacttaatctataagtatatctagttcgtttttttattaaaattctattaatttaatagtacttctattaggataaaactattctagttaggatactactattagttaatagatatatttaaatttagtagtattatattctatatagtatactaagaaattttaatattatatctaccccttccttataggaaatggccttatttttaggtttatatactaactatatttatagaatagtaatagtatattattatcctatactaccctcctctaaggaggataaaactctatatctataggtatagcgctattatatattaggctactagcctataactctactactttacctaataacccctaagcctattaaggaaccactatcttattagtagtactttttctaattataaagctatctaaactataagtataagacccttataggttatactaaatatacttactatactttagtaaagtatagttatatccctataagttaactatattattatagggaggaatctattactaataataatatagcttcctattaaggtttaatctactacctatactactcttaatatattacctatatctacttatatatcctaagtatatattattaagtaaagtattaagcgcttaacctatatagctaataaggctaaaaaggctactactattatagaagctatagaggttatagtagttactaaagttattatagtcctagaaattataaaaaatataggggatatctctaaagttaaagaattctttaatatccttactagtttagtagaggaaagtatagttcctaatataggtatacctagtaatactttatttatccctataaacttaacccctatctcttaggataccctaattatagagtctattttactattctatagtatttttaatactatcctattagtatttaagtctagctaggtatactaaccttacctatacctatatataaatcctattaagtatagggaatatagtactaatttttaatctataattaaagcttcttatattttaaatatatattcttagtccttatcttctttagtatctttataactatatttaacctagctttatagttattaagggccttagtctctttaactatagactacagttcttaggttactttaatattattatagttatactacttaactaagtaggacttattcttcttatcttaataggataggatatattcgatcttatactttacctaattattaatcttaattagtttaggagtattattatta

SEQ ID NO: 121 - DNA, 26179 bp, Penicillium roqueforti
  misc_feature (2691)..(3437): n is a, c, g, or t
  misc_feature (12541)..(13687): n is a, c, g, or t
acgatcaactctaaggatcaactccgaggattaactcagataatcaactccgaggatcaactcagataatcaactccgaggatcaactccaaggatcaactcagaggattaattcagacgattaactcagacgattaactcagacgattaactcagaggaatatcttattagtaaacgaactagcctaagtacctatttaacctgtgacttttgctaatgcttttgcgattcctaccaagtccttttccccgagtgtaattaatgcaaactcggggggaagcgtcttcctgttcctaggaattattagctataccccaaaaccattgatcaaaaatacttactttaaagcccatttttttatattccgcatcctatccttgcaatcgaccggcgttcgcatttccagttgcggatcctccgactcatcatcaagctgcttaatatacgcccaacgcatagggaacttcatccatagccggatcaaccgagcagtttccgcttcttcccatcgtactttcattcgcgagggaccatgcgattgcattcgcgagggaccatgctgttgttctctccctaattctaataactcctggatccgcttttcttcatagacttcgcgctcttccgcaaatgaaggaccatgtcgagatccatatgctacttccctaattacagtccccgcaaagtgactcgggtcacaactttccgatcgtgaggtatcgcgaccagtgccttgttgggtgtcacgaggtcctgagtaccgacctcgtaaagggtgctcctcgatactatggaacacttcctcttcgcctagtatctctgagtctggaagactttgctgtcgatactggctattcccccgtgtaggaggagggcttgaaggaatggcggatgacataccccatatactctcgtcatcacctttattagatggttgctgacgttgaatataactgaagtctcgcgatgttcgcgccctctgtggtgtatgacgagacgaaaagtcgaggtctgaggtgtactctatattccagattgtgtctgcgccttgcccatggcctcggtcgacctggcgcgtttgttgattaggccggcttccggtagtagccgaagctctcagatcacgcctagactgcgtatgtaggcgcgctggtggacccattgactcccgagaagtaccctctgcactagtccatcttaaagatgaagaggtactttgggtttggtccaggacttgagtagtctgagagttatcccttatagcactcatctcacttggagccttcctcttcttcgaagtacttccgcttgacttccatggcaaagactgtgatcggggttggtccagcacagttgtagttggtgagcctcctcctgacattgatgttcgaggaatctggcgacttggggtttcgtctgggacttgtgtagcagaagactgttccctggcagtactccgctcacttagagtcttcgtcttcctggagatactactgcttgattctgacaacagagaccgtcgttcgggaggaagagtactaccctttgacttccatggcaaagaccgtggtcggggttggtccagcacggtcggggtttcgtctaggacttgcgtggcagaagactgttccctagtagtactcatctcactcggagccttcctcttctttgaagtacttccgcttgacttccatggtaaagaccgtgatcggggttggtccagcacagttgtagttggtgagcttcctcctgatattgatgttcgaggaatctggcgacttgtggtttcgtctgggacttgtgtggtagaagactgttccctagtagtactccgctcacttggagtcttcgtcttcctggaggtatcatagattggttcccatggaaggcggcgcccttgatgttgctctggttcctcgtcggttatagggaggtcgccacttgatggctgccgaacgctatgcctccgcggtcgcttttgcatatcgatggtccgagggattttgttaactgatggccatttaataccgcggctctgaggtctctctggttccccagcagtcgaagagatatctagcggttgaacgctctgcctctgaggtagatttggcacattgatagtgcgagtgtaatcgttgattgatggccattgaatgccacgacttcgaggttgctctggtacgctggccgtcatcgtaaggtcccttggggtatccgtctgacttggactacctcccttactgatagtatcaccgatcggccgtggaagaggttgtcttttctgtatttgcgcacccttcgatactagtatttggcttaggggtatcggtcccacttgcagtctcccttgcccgatctcctcgtcagagtcctagaccgccctttctgtaggtgactcggcttcatgatctattattactaccgaatattagtctcgaattaaattccttaagatctcaacgtaccctgaagtactgccttaacccgttgggactgcatatccttgatattccggccagcctatttcaaaggcggtttttgtcacgttaggtccccaattagctaagcaagcaaccccaacttgcgacttcgcaactcagagtatcaactccgagtatcaactcagacgatcaacttagacaatcaactccgagtatcaactcagacgatcaacttagacaatcaactcnnnnnnnnnnnnnnnnnnnnnnnnnnnnnnnnnnnnnnnnnnnnnnnnnnnnnnnnnnnnnnnnnnnnnnnnnnnnnnnnnnnnnnnnnnnnnnnnnnnnnnnnnnnnnnnnnnnnnnnnnnnnnnnnnnnnnnnnnnnnnnnnnnnnnnnnnnnnnnnnnnnnnnnnnnnnnnnnnnnnnnnnnnnnnnnnnnnnnnnnnnnnnnnnnnnnnnnnnnnnnnnnnnnnnnnnnnnnnnnnnnnnnnnnnnnnnnnnnnnnnnnnnnnnnnnnnnnnnnnnnnnnnnnnnnnnnnnnnnnnnnnnnnnnnnnnnnnnnnnnnnnnnnnnnnnnnnnnnnnnnnnnnnnnnnnnnnnnnnnnnnnnnnnnnnnnnnnnnnnnnnnnnnnnnnnnnnnnnnnnnnnnnnnnnnnnnnnnnnnnnnnnnnnnnnnnnnnnnnnnnnnnnnnnnnnnnnnnnnnnnnnnnnnnnnnnnnnnnnnnnnnnnnnnnnnnnnnnnnnnnnnnnnnnnnnnnnnnnnnnnnnnnnnnnnnnnnnnnnnnnnnnnnnnnnnnnnnnnnnnnnnnnnnnnnnnnnnnnnnnnnnnnnnnnnnnnnnnnnnnnnnnnnnnnnnnnnnnnnnnnnnnnnnnnnnnnnnnnnnnnnnnnnnnnnnnnnnnnnnnnnnnnnnnnnnnnnnnnnnnnnnnnnnnnnnnnnnnnnnnnnnnnnnnnnnnnnnnnnnnnnnnnnnnnnnnnnnnnnnnnnnnnnngactatcaactcagactatcaacttagactatcaactcagactatcaactcagaggatcaacttagactatcaactcagagtattaactcagagtattaactcagagtattaactcagagtatcaacttagagtattaactcagacaatcaacttagaggattaactcagacaattaacttagactatcaactcagaggatcaacttagacaatcaactcagaggatcaactcagataatcaactcagacaatcaacttagactatcaactcagaggattaacttagataatcaacttagactagttaactaacgtaattcactaccaagcggcgcacacacccaagtggcgcaccccaaaacacatagtaagaatgataaattccttacctatatctcaactaacaatgttcttatttaatttcattacttcccgatagcaattgataagtatttttagtattatatctctgttttaaataaatcgagaacttgcattgttatggtatcgaaaaatacgtcgctgaacccctagaaatatatatatctcagtttgtcaaagttcctgaaactacataagttagatatatatcatataaaaagaactgggctataaggaaaactttatatagatcactgttgttacgatatcatgttgtaatttatcatttttactatgtgttttggggtgcgccacttgggtgtatgcgccgcttggtagtgaattacgttattaactcagaggatcaactcagacgatcaacttagaggatcaactcagaggattaactcagataattaacttagactatcaacttagacaatcaactcagacaatcaactcagacgatcaactctaaggatcaactccgaggattaactcagataatcaactccgaggatcaactcagataatcaactccgaggatcaactccaaggatcaactcagaggattaattcagacgattaactcagacgattaactcagacgattaactcagaggaatatcttattagtaaacgaactagcctaagtacctatttaacctgtgacttttgctaatgcttttgcgattcctaccaagtccttttccccgagtgtaattaatgcaaactcggggggaagcgtcttcctgttcctaggaattattagctataccccaaaaccattgatcaaaaatacttactttaaagcccatttttttatattccgcatcctatccttgcaatcgaccggcgttcgcatttccagttgcggatcctccgactcatcatcaagctgcttaatatacgcccaacgcatagggaacttcatccatagccggatcaaccgagcagtttccgcttcttcccatcgtactttcattcgcgagggaccatgcgattgcattcgcgagggaccatgctgttgttctctccctaattctaataactcctggatccgcttttcttcatagacttcgcgctcttccgcaaatgaaggaccatgtcgagatccatatgctacttccctaattacagtccccgcaaagtgactcgggtcacaactttccgatcgtgaggtatcgcgaccagtgccttgttgggtgtcacgaggtcctgagtaccgacctcgtaaagggtgctcctcgatactatggaacacttcctcttcgcctagtatctctgagtctggaagactttgctgtcgatactggctattcccccgtgtaggaggagggcttgaaggaatggcggatgacataccccatatactctcgtcatcacctttattagatggttgctgacgttgaatataactgaagtctcgcgatgttcgcgccctctgtggtgtatgacgagacgaaaagtcgaggtctgaggtgtactctatattccagattgtgtctgcgccttgcccatggcctcggtcgacctggcgcgtttgttgattaggccggcttccggtagtagccgaagctctcagatcacgcctagactgcgtatgtaggcgcgctggtggacccattgactcccgagaagtaccctctgcactagtccatcttaaagatgaagaggtactttgggtttggtccaggacttgagtagtctgagagttatcccttatagcactcatctcacttggagccttcctcttcttcgaagtacttccgcttgacttccatggcaaagactgtgatcggggttggtccagcacagttgtagttggtgagcctcctcctgacattgatgttcgaggaatctggcgacttggggtttcgtctgggacttgtgtagcagaagactgttccctggcagtactccgctcacttagagtcttcgtcttcctggagatactactgcttgattctgacaacagagaccgtcgttcgggaggaagagtactaccctttgacttccatggcaaagaccgtggtcggggttggtccagcacggtcggggtttcgtctaggacttgcgtggcagaagactgttccctagtagtactcatctcactcggagccttcctcttctttgaagtacttccgcttgacttccatggtaaagaccgtgatcggggttggtccagcacagttgtagttggtgagcttcctcctgatattgatgttcgaggaatctggcgacttgtggtttcgtctgggacttgtgtggtagaagactgttccctagtagtactccgctcacttggagtcttcgtcttcctggaggtatcatagattggttcccatggaaggcggcgcccttgatgttgctctggttcctcgtcggttatagggaggtcgccacttgatggctgccgaacgctatgcctccgcggtcgcttttgcatatcgatggtccgagggattttgttaactgatggccatttaataccgcggctctgaggtctctctggttccccagcagtcgaagagatatctagcggttgaacgctctgcctctgaggtagatttggcacattgatagtgcgagtgtaatcgttgattgatggccattgaatgccacgacttcgaggttgctctggtacgctggccgtcatcgtaaggtcccttggggtatccgtctgacttggactacctcccttactgatagtatcaccgatcggccgtggaagaggttgtcttttctgtatttgcgcacccttcgatactagtatttggcttaggggtatcggtcccacttgcagtctcccttgcccgatctcctcgtcagagtcctagaccgccctttctgtaggtgactcggcttcatgatctattattactaccgaatattagtctcgaattaaattccttaagatctcaacgtaccctgaagtactgccttaacccgttgggactgcatatccttgatattccggccagcctatttcaaaggcggtttttgtcacgttaggtgtaagatactcctagatttagaaatttcaataaagaaattacttattaaaaatatatattatttattaagggaagcaactttgtggggaatttgggttctagggtttaggaatagttagtataccgtattcagtgattattattcgcttatctttttcatggaaattatatccactctaccataaaatataggggattggtagggttggtgtcagggaagccggaacgggccggaaaggtattccggccgagaacacagcctgcctgataatgtcattgaacgccaagctttagcggttagaaaaataagtgtggatttcaacagctacaagcccgaattcctaccatagaactaccatcacaaatgcctttacgacctagccagcgtacaaggcgtgtacgggaagatacccgagcccgtacagcctttttacgtttaagccagacaaataacctagaatccgaccttgacccattccgcaataccttcctccttaatgatccacgtctaatcgagccttctgaaccatcagactggtcgattatgaacgatcttagggaggcccttgatgctgaaccggagctacgtgagaatctagcagaacccgacatcacttctattctaccactagcacagtataattccccaccgtctttccatccccctcaggcctcagacgatggtttatccgctatctcacctctagtagtcgatgactggcaatctaccccggataatatcattgatccagataccaggccaagttagttctttctagtcactatcgcgatatatccccagggactaaaatataagtagatacaccccagccagagcctacaccaggaccttcccgtgtcccctcgccatcacatgaatctaatactctaggggttgcatctggtcgaccccaattagacccgacaccgctagcccaggcactagtcgaccaactcatccaacatcaaggctgtcaagctcattctctaccttcccgtagcccagagtctgtctctctctcgacggtttcaggctggacctgccctgacgtactctcttccccgagtatcgcccaatatcagtctgggaatccatgggataccttattccctgtcgagctcagacagcaggtctataccggaggtatagatatgagtccgtccctcgatctacatgcagataccgtcgagccagagggtctccaggtctatttcgatattgatagtgccgggggggttgcatcatcacttgccgtcgcgaaagaagggctcaagtggaaggctggccggagcgcagtcagtaatctccagagctcccttcacctcaaccctatcccggtccaatggtttgattctcggcgtcatagtgcgcttcgacccctacatcaagtcccacatctcccgtttggtcgtctcgtgggctttccggaggtagaagtctatctcatttttccacggctctaccacccatcccgcgaccactgggtcatcacagtggatgaatatacgcaatggaccgattctattcttcttcccgcaatccagcagacgtatcctacgtctacggtccagcacctccctagtagcgctgatcatattcggatgaatggtactgctgcacaggtagagggtcgttctggggcccaaactatcactcctacctttacgcaggacttccacttcaatctccacgcagaccgattggatgcactctgggagtgtgttcaaacatatacccagcaagatggacttacccacttttccaactgctctatcctcctaacagctaagaacctgaagcttgtcagccagcgcgctacctgggcccaggcacgtgacgcgtttcttcatcagtggaagcgggctattaacccaacctttctgagagatgatttctacgatatcgccaaggaagtagtaccaagatccccgcaggcgatgactctatgctggcgccgatgctgccttgagagctttagcacgtggctcggccagagtaacgctgccgcagaggattgccaaaattccccgccgacctctcggactgaaggccaggtaaccaacaatgagcaagattaccctaggactcgaagtcggatagtaggccgtccactaagtcctagcgaagatagtctctataacgaaagtgtccatgaggacagcctctatgaggacagccttaatggggacagcctctatgaggaaagcctccatgaagagacccccggttctgattcctacgatccacaccagagtgaacaggatcaaaatcccgctccggagccgtccaaagcccagtggcgccagcaattttatccccagtccctagttcgggatcagtgctcgatgactcttgcaccaaaccgcactagtcctctctggcggcgtggactacgctactgccagttatataatacctcgaaggagatgtttgctgctggtaaccattacctctttggcaatcctcatttcgactcccttactctcgaccctgccatgctacgctcctggcagcatgtcggtggcgcagtcagccactccccaatcacattactccgcggttatattcataccaagattcgcagtcacactgcgcttagggactgctcacagcgctcctatggtacccgtgaggaataccgtgtgactggggctgtattccagaccgtcgatcgactactctgtgcctctggggttgcagatactccaatcattctcccaacggagccattcccattctgggcatatcctacccagttaatgactacctggtggcgctggaatatcaatcgactctgcgttggctttgagatgacatttagccttcgaccgcgtacctttgtgcactgggagcatacccgcgtaatgatgatgtttctcaaatgtcttctctacgtgtatggcggccagggcgggcatcctcagcaaagcctcggtctttggattgaccgtcggagccaaccccgccccggctctgacacagagtttatccaggaaggtatggctcttgggccatcattggcgaagtatggctatggttggcttgcgagtaaggtggactggacggttatggtctttaaacccgcccaccgtgcctatatcgtctttaatacgccaagtatacagtctgtgtatcatcagcgctattgggcagttcggcagtccaaggatgattttttaatcttccatgatgtgctccagcgggttcaagactaccatctcgattctgaccgttctgcgttactccttcagctcctagtggatctctgtctacgtgccttccgccaggatgtctttcgggcccttagtgaacgccagacccagcagcccctcaatgcacactggatcgagaaagctcgggccggcgaggttgcgctcgacatccacgggtttcgccaggttttcgatattggtatcattgaggacgacctccatttcgtcaacaccaaaaattccgctatccgccatctagagaccttattcatccggctctggggctgggacggcgatggtaataatggcgactgggaacgtaagcactgggaatataaaccgtaccgggtcctcttccgccagagctatggtatcatcgcgcagttccatgggatgcaacaggcgcgcgcgtggcgccaacgcctgaaggagacctggattcggtcccactggatcctcccatatcctaactcaagtaccttctggtcccgtggcacgaaacagggtcggctccaggtatggtcaagtgtacatccgggactaggtgagtactacgagcggcgaccccaagggccaccaagccgtatcaccccagagaagctccactatctacctatctcaggctggaaatgtcaacatcctggtcgcatcgcgccgcttgttcagattattcttccacctatcccgtccgatcttgatcattttctcgatctcggtgatagcgtaagcaatacaagcgaggggaatcatctgcataatccgtcacaactaagcattcctcttcctgcaccgggtatacatccagactctgtgcttagtccgttcatccatgctatatctccagagctccactttctccgtcggttcaagaaggaaagcaaacttacgaccgacgagatccaccaagattctaggtggcagcagaggattcttctaaagcatattgaggctatcatccgcgtccatcagcacgagctgaacatgctccagaaacccctagtcgtatggccatcccgcccccgcccgaggctgaccaatggcctctctcagatccatgttacgcctcagcagcttgaggatgaagactcggatactggcaacttctaccaatgtcgtgaacgcctccggcatgagattctacggctacaccaaagggcagggcggacacggcatgagatcgctaggatcgatcgaacggagagaatcatccaggcccaccagccccgagaccttacagatcacgatgaggcttcacagggcccttcggatcaacttaggtgggctaagaagcgaaggcggctcgcccaggaccgactggaacttatttctcgcaagtgtactaggtagtttatgaaaggagaccaggcggtcgatgggactgtatacgcttcatcgcaactgctggatgacaataatagtcgctgcgggggagattatggagaagccatagatgcctgcacgcgttataacttttctccactgtctctcccacagcttccaccgagctcgctggaggattcgcacttcgatatgggggtgtttctaggtgctgaggctgctgcagccgctgtattgccgccgtccagtgactcgttctttgatgaaaccgccggtctgattgaggaggcgtttagggagacgggcggcaagttcttggaggatatattcgatgggagccttgaggatactgggggtatactgcttagagatatttgattagcttgatgttttcctttggctgtatcatcatgaatggctgcacctttttgtcttctaaagatcgcaataccaggattcgatgagtctatgcccgggagaatcgcagttatcgaactggtaaactgtatcaagctttatttattgatagcgtggctgcagttggagtgatgcagcatatagtcgagtgtaagggattcaaggtggattggagatagatagctattctgccgctttgaccgcccaagtagggtagactcagaagaccgcgacaagaggatctactcctttgttctcgcccacgggaaatgttgggtttgatcggcagttggaagttgagttatttcgctcagaatgctgcgacaatagaccccgctttttgtctgtactcacagaaccggaggggtttacccatagcaggagtttaccagcgacaggatacagcatgaatgatggcccccagactctgcaatagtcggtgccttcgaatatcaatatcctgcaatgctagtctataagagagtcagctggataaagtgcacttctccctgtcggcgacctcgagcatcagcatcctacaatatcagtctatagaagagtcagctgtataagttgcgcttcatccccctctgagacattgagtatcaaaccagcggaatgtaatgcaagatcggttaaataaagtacggtttgttttttacctgtggaacctgaggattttgcctgcagctgtgtttggctttctcagatgagcttgctccccaatattggacctnnnnnnnnnnnnnnnnnnnnnnnnnnnnnnnnnnnnnnnnnnnnnnnnnnnnnnnnnnnnnnnnnnnnnnnnnnnnnnnnnnnnnnnnnnnnnnnnnnnnnnnnnnnnnnnnnnnnnnnnnnnnnnnnnnnnnnnnnnnnnnnnnnnnnnnnnnnnnnnnnnnnnnnnnnnnnnnnnnnnnnnnnnnnnnnnnnnnnnnnnnnnnnnnnnnnnnnnnnnnnnnnnnnnnnnnnnnnnnnnnnnnnnnnnnnnnnnnnnnnnnnnnnnnnnnnnnnnnnnnnnnnnnnnnnnnnnnnnnnnnnnnnnnnnnnnnnnnnnnnnnnnnnnnnnnnnnnnnnnnnnnnnnnnnnnnnnnnnnnnnnnnnnnnnnnnnnnnnnnnnnnnnnnnnnnnnnnnnnnnnnnnnnnnnnnnnnnnnnnnnnnnnnnnnnnnnnnnnnnnnnnnnnnnnnnnnnnnnnnnnnnnnnnnnnnnnnnnnnnnnnnnnnnnnnnnnnnnnnnnnnnnnnnnnnnnnnnnnnnnnnnnnnnnnnnnnnnnnnnnnnnnnnnnnnnnnnnnnnnnnnnnnnnnnnnnnnnnnnnnnnnnnnnnnnnnnnnnnnnnnnnnnnnnnnnnnnnnnnnnnnnnnnnnnnnnnnnnnnnnnnnnnnnnnnnnnnnnnnnnnnnnnnnnnnnnnnnnnnnnnnnnnnnnnnnnnnnnnnnnnnnnnnnnnnnnnnnnnnnnnnnnnnnnnnnnnnnnnnnnnnnnnnnnnnnnnnnnnnnnnnnnnnnnnnnnnnnnnnnnnnnnnnnnnnnnnnnnnnnnnnnnnnnnnnnnnnnnnnnnnnnnnnnnnnnnnnnnnnnnnnnnnnnnnnnnnnnnnnnnnnnnnnnnnnnnnnnnnnnnnnnnnnnnnnnnnnnnnnnnnnnnnnnnnnnnnnnnnnnnnnnnnnnnnnnnnnnnnnnnnnnnnnnnnnnnnnnnnnnnnnnnnnnnnnnnnnnnnnnnnnnnnnnnnnnnnnnnnnnnnnnnnnnnnnnnnnnnnnnnnnnnnnnnnnnnnnnnnnnnnnnnnnnnnnnnnnnnnnnnnnnnnnnnnnnnnnnnnnnnnnnnnnnnnnnnnnnnnnnnnnnnnnnnnnnnnnnnnnnnnnnnnnnnnnnnnnnnnnnnnnnnnnntgctggaggtcagagctgggggcgcggtagccactagcattactcgatatgggacagtggacgggcgcagtttcagcctccttgaatgtcttcgccactacttcccctcggcgctcctgaatgcagacctgcgctcctcgagcttgggaaccgacgagatgtgcttacactgcgtcctccgtgtggcattcgatgatccagcgaccctccacgaccagaaaccgttctgcaacccgggctcagggaattcttgccgatcctgctcggaccagggactggcgtgcttccgcatcccgccgctgggaagccgcgagctcgcttcagacatgcttcgccgaacccagatatcgaactcggccttctcccacgaacactggcgcttggtctgccgtacaatcgctgagacagttggggtgagcgagcgggagctccgtcaagcgatgctgtgggataatcgctacctccgcccctgtgagcggtccgcaaggcaccccgaataagcctccatcaatcctgttacgtggtaccaatgatcaaagttgaaagctgcacaagaaatgaatcccatagaagaaataaatcactgctgaaattccttatctgcgatatatatcaaagtaaatcacaccctaagcggaaatgaattcctagtcggctatataaaatcataccagtccccggagtcgaaaaaaagagtttgctccatagtataaggcctctagtctctggacctcttggaatgcagcaagaaatgcctgcgctgctcgctggcgccattgctggataaagacctcggctgcatgggtatcggccccaaagagaacgtccagctcggaaatgacactggtattggtccatcggcggcgtccaaccagcgcatcggagatcgcaccaagtccctggaggtggaccgcgcccgggaatgcatatggcacagctccgcggtggacgctagtaaatccaggggtacctctctcggcggggatgagatcgcgatgcgacgcagcgacagcagaccacgtaccggcatcgtgagtatccagctgctcatggtcttcgccaatgccaataaaccatgggaggacggtacgtcggacttgggtggccgggccggttgagccataggggagctccgggcgcgagatgcgcgcatcccctcggtgacagacctggcgctgccacgtgaggccaaaatcggcctcatcagcggcagtccacatcccactggcgatgcgatgaacgacattctggttggagaggccgcgctgctcgacccgttcccaccactgctgcaagagtccctggcggtgcatgccaaggaggagctcggtacaattcgccgggtcctcgtcgctcagggtgaccgcgccctgtatgatgttagcactccgaccccggctgagatagcgggggatattgatatcgaggtgccgaaatgcggtctgggctccggcactggtacttttcgagtaccacgggaccgagatcaggcgccacgcatgatctgggcgaaggagaacataaaaggcatagtatgcgggatcctggcggatgagctgctggatcagaccgtgccacatacaccggagccatcccatgctggtcacactttcttcggcgggattctcgccctgggcccggtggtgctcatacatgtcgaattccaagtcaatcatcgaccagagaccgccggtatgctcacaggggacatcggcgctatgggtacagccaagcagtttcttctcaccaagccagcggaagagaggaatgaccactgagccatcggcatcccataagtctgcgatgggagccgtcggggggggaccgattacccgggtatagatctcgtctgcagtcatgccactcgcggcaaactggtcgatgcgaggcttaggcatttcgactgggtatttaaagaccccatgtgcagcagtgggactaggggtccgagccgcctgttggaaccacttccactgctcacatgtcgggtcactcttgatatgggcaaggctctccaggtgctcgaagatatattgtaagcggctgaagagtttttgattattcggcttactgcggagcccgattccactggcgaggagtcgagcatgggtccgacagaaattctcgggggaaagtgcccagtattgtgtaccacggccagcaattttctcaaagagttgcggcttgattcgtgtagtattcgcatcgtgggactgatcttgatcagcatttaggatatcgctactaggctgtcgctttccctggagaagacaaaggaggtgaggtgtaaagccgctctcgatgcagaggcatgcactggatgatttctgttttggctgggccctagtagccgaatgctcagaatagtcggggtctaggtggtctgcatcgatatcggtatcactataggcatcagagtctccagtatccatatggtcttcactgtcactgtgagcatcagagtctccagtatccatgtggtcttcactgtcactgtgagcatcagaatgtccagggtcgacgtggtcctcggtaggcctgcaggcatcagagtctccagtgtccacgtggtcttcactgtcaccgtgagcatcagagtctccagtatccacgtggtcttcactgtcaccgtgagcatcagaacatccagtgtccatatgatcttcactgtcaccgcgagcatcagaatgtccagggtcgacgtggtcctcggtagtactacgggcatcagaatccctaagcctatccatcaagtctttagcctcactgtaggtatccgaatctccaggctccgagtcgatctccatatccccctcaggcagtggcgcggtctgcctcggagggatctgagtccgggcctcggtgctgcttcgaatgaccaccgatggtgtactcggcggagacaatgcaagactgagaggaggtgtcgaactcctgggcgtaaatcgtcgctcgccggatttcaccatcgcggcggcgtcagtaaggagcccgtcggatccatagtccattccgatgcggtggagcatggtctgcgtgatatgggtttggcggaaattccgataggcgcgggtgagatcaccctgcgtgagcgaccgcgtcttgagctggccgggccgactagtagagagtcgagtgcagagctcgttattggtggcaagcaggaagctatggaaggtcgggggtttaggccgatggagcatcttactgatcccttctgccatggcgagggtagtgatccgttggaagaggcgctggatcatggcttccgtgatgccatctgccttggatccccagacttgatatgcccgagtctgaatcgagcggatgcgcttcgtcgcattctcatgtcgcctcatcgcccgctgcgcagtctcccagtttttgctctcaacgggtgaggagtcgggatcggagatcacatacttgttatggcatcggctatagaaaagggcaagtaaagcctcgtcggtactgagctgcgtgacgagagcggcgaggacctagggtagaatggtgtgagttggcggtgaatcaatgctgggtgggttcatactagctggcagaggtcatggccggcgcggcctggctgcgtttcaatgatggcgagtgtatcttggaggcgactctgggtccagggaccacctagagtaatagtatgattctgaccggtactgtcagtgataaagcactcctgatcgagtgacagggctggcataattgaggcgtggagtgatttgattgcgaggctgatgtagaattaaaatatatatattagtgatgcgcggttggaatacatttgagcagggcaacagatatgatctttgatcttgggtttctatttcaggtatcctttgagatcaattatgaaaccagccctggatgcaggcttctaagttgaggaaaaagtttctagtatcctttgacattatacaaacttgaatagcctaggaatagaccttggcgatcactcggtctccggtaatgatttctttcttctaacgaactgggaatccaacttgcagagggactcgggattaggaattccgtagcacttctttattagtactggtttctttgacctatatgggtgattttcctctgtgaatcttcgctccacagtaagcctggaagtcatctcccaagttgataaaaaagtaggctgttctactgtgaaccattactcctacccccttttttttttttacctacaatggctcccacgttaaggtcctctacgataccccaagctgtgaagacagcagcaaaggccccgaagagagcagcaagggccccgaagagagcagcaagggcagcgaagagagcagccacagtagtcaactcgacactcccagacctggacttacctccatatatagtgatacggcaagcccaacccgctgctgcagtcgctgctcgcgatgtaccgttcgcgggggaaaggactttcccaactccgccggtaccctttatctatcacccaaagctgatgtggtgcctccgctgcctaagcgtgaagctgaatgggttcctgccgaacccaggagaaagctttggggcagccggaacactatgctgctttgaatatacgggttcagtcaagtgcgctgggtgtcgggcggccagtcatctctgtgaagtggtatatgccgagcccgaagcggtcggaggttactaacagattcgataggtcccggaggcgatgcagcaggacgcgttggatttgaccgtccttctgcgctggggagatcggttctggactgagccgcagcccagtgttgcatgggatccatcgttactgcaggccgtttcaacgtgtaccttccggctcgcacaatccttctacgcgtttgtcaaggagcatatgcagcgccatgggctggagaagaaagatggcacgaaactgaaaccggtaggtaaccatccgatatccgtgatcagagactaatagagcccaggaggagagggagttatatgaggacttcatccatcgacgccgattgaccctagcatcgatcgcccagaaagcccggtatccagtcgagagacagtgggacctactgtttttacaaccgggggatgaagaatacatgggctggctacgagcgaaggttacattttatattacgatcgaaacgtgtgtgcaacgcctgcacccggctgagaggtccatcgtttatagctggccgctggataagaagcagttaaacttggatttttgaggggatagattgggcttttggagattgaaatacggtatcggcttgagttcttgcgtgtctgctgcgaataactagaaattgagttactgtttctgatctgtatgaattgggtcttgattcggattacaagtatatattggaaagtagagagtatggagtaataagcttggggaatctcgtgggatcgaatgctctttgcctggatagagcatcgcaacccttgtacccaggcccatcggaaccactgcgccaatgcggcccaaagtccccagttcggggtccaccgtgcccaatgctggaagggggctctgataacttctgccgtccctctggcgattaggatgatatcctggataaggatcaggacgtcgcggatgtcctgaaggaggttctgaaccctcgcagcgactgtgacggccttccgcatgatatctgcggcacggtcgaagagggtggtactcgccacagcggacatggcatcaggcattgtaggagataatataggggaatcaagtaggtagatccgacttgaatctgatctctgcgacggtaattagtcaggctgggtgggaacagaattgaggatgacttaccttgagaggatgagtggacttgaatatttcgacgatgcaccttcgggcgatttgggatgattggctttagggctgaccgcctacgggtagttctgccggccataccccacaaatgaattggtctctccgctttactttgagcctcatgtgtatctctttgccctcagcgaatcccccccccctcaatgacactgaccactaatatccgacagaggatattgataccaagttctaaacctaaaatccatactattccatatagagatatccagaccttgactgtacaaccccaaaatctgctcactttgggctggcgaccaatacaaagaattcgctgccacgcaaatgaaatgattcgccggcgatcaaagcccagcgaattctcccaacttctatctatgccccgattgggcgagatacatcaggctggatggtttctttgactgtatactcggctgggattgtacattttccatttccagcgcgcggtcaccagattcgggcttatggaattggggctaagtcgcatgtctttattgcgttttggaatctaactttggatatggtgccctgccactgtgaggaggcttatttctttatttgatactggtgcaatgctaatactttgggtttacaatttcggcctacagccagtaagtagaagctgctcaagccacttcgaaccatccttgaaacccctgctactccgacttaaagcctaatcaattcctctgtgcaatcaattcctctctgcgatcaattcctctctgcgattaatcctctctgcgattaatcctctctgcgatcatggcatcgcaagttggtgggaagcctccagtaatacctgcagtagcgaagccacctgcagccgctcccctgacaggtcctagagtcttggacctgccaacatggaatgtgaggccagagccggtttgggttttctgtcttgggtgtttctatgtcgaggttactggctttcaaccaaacccagcggaatgctttagcttggaagagactatttgcgtattcgaccacccagtcgccagtgactgcgctgggtgtcgggctgcaaagcaggagtgcattatggtatgtgactgagatgaatggttggactgagctaatgatggatataggtcccaagaggattgcaccaagatgcatacgacttcatccagctactagtgtgggtaaaatcgttctgggataccggtgccaccaagaagcatcaatggcagccggagacactacaagtggtatcagaggcttcaggcgagcttgcatccagcttttatatcattgcgaaaaagcacatcgactactggcatcttgggccgagcgctacagccacggacagggatctatatgataaattcgtctatcgccgctcacagatccgtggaacgcgagtggggaagattagaaaagccgaagacactccggttcgcgtcccgctgtgtgagaagactatgattggtcttgtgccaggggatgtagaatttgcactctggactcgggccaaagttgctatcgtggagacggtccgagcagctgtcgctcagctagagggcgatacgggtaagacattgttggcgggctgggactcgatgatacccacatactatatatagggggaggtagaagaacggtggtatttcgaacttgtttaggtagtgttgtgaaattaaatgcttaaagattatgactccggcgcaaaatcaagtcactcctattatatattgtataaactatgtataatcccgactctgtgacataaggcgtcaaaaacttggaatatatgctgacaccagggcttcttcggcggccttgagcattgatatcctagaatatatattgataccgggatcatttgaataaagtgcgcgttatctcccccctccgagacattgagcatgaaaatcgtggaatgcatactgatactaaggcttttcatgcaaactgcgaccaatcacctgcctcagtaccttcgagtatcaagatcgtcgaatgtatgttaataccagggtcacttaaacagactgcgcgtaatcccctggtacaatcgattataactactgcttcaactatagtaagtactgtccaagtttcggaagaaggcggtctgtggcagaatctccgactcaagaacaaaacatgtcgaatcagcccgcgtaacatcggcccagaacccagcaccaaagctgggttccgaacctatgcttttgcaagtagacttcttagggagttaaatgtaaactgtcaagacctcagcgcgatttagctcggtttggccgattggatgggggtagaaatttgcatgcaagtattcagatgcgcacgacttgacagaagcttggcgcgggaaggctccacctccgcgaccacatcaaacttttgagatattcaagtccccacaacatacttcatagcagggctttagactctagtacctatgaaagtttcaagataatcgaggctgggttgcgggctgtacccagcgtagacaattctcagcaagcattcagcggcaaagcctataccgcattagatactccgtggtagagtatcaattgctaatattatggttgccgcataatgcgtcgccgagtcgcgcgactcgcgccccgctgtaaacaataatcttctgaggcctgcctagatcttctttcttttcccccaacactcctccaagcttactctggcgacagctttccaattgtctcaaggtacaccctatgtccttactactttgtcgccaagtctgaccgattctactgcctcagctattcctatccggctcgcctgaccgctgaagttcaagctgtctcaatggcgttccctttggcgttgacgatagtaagagaatttctccaggcggtattctaagcccaaaaatactaactatcctctagtcgcttttcacgctcctcactactgtgtccgtcgcctattacctcttgaaactgcctgctgccatgccctgctccatggcggagatgctcgctttccttacccgggcgaaggaaatcctgcggggagtactcgaggtgctcactattgcgaagaaggtcctggaggaagtgaaagaggtacttcggatcgccaaggagattacgattatcatcggggagctattggccgctgtcagaggcctctttcactggcgccagtgggcgctatggatactggaggttgggcgttcttggctccagtgggcacaggctattaagcattcttggcttcaatggatacaggtcacaaacgattcctggcttcagtgggcacaacaggttcagcgctcctggctccagtggatgcagactattgagtattcatggcttcgatgggagcaacagctcgagtactcctggctccagagggcacaggctattaggtaccaattgattactaactctcttcttgctattctacgttcttctcgagggagaattataattgtggataactagttacttatcctaaagcccaatcgtgcaatacatactgacaccaaggtcagccgaacagagtgcacagaattctccctatcagcgacatcgagcatcagcatcctgcaatgcgcgcaattctccccgtcggcgacctcaagcatcaacatcttgtaatacatactgacaccaaagttagctgaacaaagtgcacgcaattgcccctatcggcgacctcgagcatcagcatcctgcaatacgcgcgattccccctgtccacacaattcaccccgtcggcgacctcgagcatcagcatcctgcaatgcgcgcgattccccctgtccacacaattctccccgtcggtaacctcaagcatcagcatcctgcaatgcgcgcaattcctcccgtcagcgacctcgagtatcagcatcctgcaatgcgcgcaattcctcccgtccacacaattctccccgtcggtaacctcaagcatcagcatcctgcaatgcgcgcaattcctcccgtcagcgacctcgagtatcagcatcctgcaatgcgcgcaattcctcccgtccacacaattctccccgtcggtaacctcaagcatcagcatcctgcaatgcgcgcaattcctcccgtcagcgacctcgagtatcagcatcctgcaatgcgcgcaattcctcccgtccacacaattctccccgtcggtaacctcaagcatcagcatcctgcaatgcgcgcaattcctcccgtcagcgacctcgagtatcagcatcctgcaatgcgcgcaattcctcccgtccacacaattctccccgtcggtaacctcaagcatcagcatcctgcaatgcgcgcaattcctcccgtcagcgacctcgagtatcagcatcctgcaatgcgcgcaattcctcccgtccacacaattctccccgtcggtaacctcaagcatcagcatcctgcaatgcgcgcaattcctcccgtcagcgacctcgagtatcagcatcctgcaatgcgcgcaattcctcccgtccacacaattctccccgtcggtaacctcaagcatcagcatcctgcaatgcgcgcaattcctcccgtcagcgacctcgagtatcagcatcctgcaatgcgcgcaattcctcccgtccacacaattctccccgtcggtaacctcaagcatcagcatcctgcaatgcgcgcaattcctcccgtcagcgacctcgagtatcagcatcctgcaatgcgcgcaattcctcccgtccacacaattctccccgtcggtaacctcaagcatcagcatcctgcaatgcgcgcaattcctcccgtcagcgacctcgagtatcagcatcctgcaatgcgcgcaattcctcccgtccacacaattctccccgtcggtaacctcaagcatcagcatcctgcaatgcgcgcaattcctcccgtcagcgacctcgagtatcagcatcctgcaatgcgcgcaattcctcccgtccacacaattctccccgtcggtaacctcaagcatcagcatcctgcaaaagagagcagcaagggcagcgaagagagcagccacagtagtcaactcgacactcccagacctggacttacctccatatatagtgatacggcaagcccaacccgctgctgcagtcgctgctcgcgatgtaccgttcgcgggggaaaggactttcccaactccgccggtaccctttatctatcacccaaagctgatgtggtgcctccgctgcctaagcgtgaagctgaatgggttcctgccgaacccaggagaaagctttggggcagccggaacactatgctgctttgaatatacgggttcagtcaagtgcgctgggtgtcgggcggccagtcatctctgtgaagtggtatatgccgagcccgaagcggtcggaggttactaacagattcgataggtcccggaggcgatgcagcaggacgcgttggatttgaccgtccttctgcgctggggagatcggttctggactgagccgcagcccagtgttgcatgggatccatcgttactgcaggccgtttcaacgtgtaccttccggctcgcacaatccttctacgcgtttgtcaaggagcatatgcagcgccatgggctggagaagaaagatggcacgaaactgaaaccggtaggtaaccatccgatatccgtgatcagagactaatagagcccaggaggagagggagttatatgaggacttcatccatcgacgccgattgaccctagcatcgatcgcccagaaagcccggtatccagtcgagagacagtgggacctactgtttttacaaccgggggatgaagaatacatgggctggctacgagcgaaggttacattttatattacgatcgaaacgtgtgtgcaacgcctgcacccggctgagaggtccatcgtttatagctggccgctggataagaagcagttaaacttggatttttgaggggatagattgggcttttggagattgaaatacggtatcggcttgagttcttgcgtgtctgctgcgaataactagaaattgagttactgtttctgatctgtatgaattgggtcttgattcggattacaagtatatattggaaagtagagagtatggagtaataagcttggggaatctcgtgggatcgaatgctctttgcctggatagagcatcgcaacccttgtacccaggcccatcggaaccactgcgccaatgcggcccaaagtccccagttcggggtccaccgtgcccaatgctggaagggggctctgataacttctgccgtccctctggcgattaggatgatatcctggataaggatcaggacgtcgcggatgtcctgaaggaggttctgaaccctcgcagcgactgtgacggccttccgcatgatatctgcggcacggtcgaagagggtggtactcgccacagcggacatggcatcaggcattgtaggagataatataggggaatcaagtaggtagatccgacttgaatctgatctctgcgacggtaattagtcaggctgggtgggaacagaattgaggatgacttaccttgagaggatgagtggacttgaatatttcgacgatgcaccttcgggcgatttgggatgattggctttagggctgaccgcctacgggtagttctgccggccataccccacaaatgaattggtctctccgctttactttgagcctcatgtgtatctctttgccctcagcgaatccccccccc

SEQ ID NO: 122 - DNA, 18224 bp, Penicillium roqueforti
  misc_feature (6267)..(10375): n is a, c, g, or t
acagttatagcagtgggttacgataagcatgcattagcagaaggattggcaattattattagtagcatagtcggcaaaattaagagatacctccttacatttcgaagtgcatacaggttatgatttgcctcaacgcttatagcaatagatgcatgaggtggtactaagacagattcggtctcccaaggcccttaacacaccaccaggaacaactttggcgttcccaggagctagactctagagattctccgcaaacattgttatcaaggctttgatactgccgtgtgattgctacgcacctcagaggagccacaggctacactcctagcggaccataggatttagccgaggcaagtatataaaggactcccatattcaactttcacaactctcaccttaccttcacctacacttcatttactctaagctccaatccactgtctaaccatggtctatttcaattcattcttaccgggcttaccgatgagctaatatattatagccaaatatcagagacctacccaacgagcttttgctatggattatatcgcatttggatggtagtacgatgttcgcccttacaaaattgtgcaaagaccttagttttagactctagcccagtatctagagatataacatcaaattccagaatagcaatctattacacctggccgttaaagacgacaatgttgatcttgcggcggctttgcttcagcataatgctaatatcaatgccttttaccgaggcaaaatacctttgatgagggcgtttcaatactcttccgccgcaatgcgtgagctgttgctcaatcgtcgagagctagatattaatattcagaatcaagcgcacaaaactgcgctatggtataccatttactatagaaattattccatggttaagagccttttagagtaacctaaggtcagagtggatattaaatataaatacagccaaacggcgctctacctagcggttttcgctagtaggatagagtttatacatcttctactatcaagaggtagtaaccctaatctataggatgattcaggcgaatcaccgtaggcctaggcacatcgcttctatagacctataataaaaatgattctttccaacgaccctaactccgacttatttcttagaactcaatcatcacaggacgctcagctaccgctatatcaagcagtagcccatggttctatcgccgctatctagcggcttctaaggcgaaaggacctagcgctagacacctaggaccacaaaggttatacgccgatccatctcgccgttaaaagcaatcgccctaaagtggttagtttactcctaagttacccgcatgtaaatgtgaactgcacagacaaatatggaaatacaccgctttagctttctacttactcgtcctactataaataaccgaaaggctgttagcctagaaaaaaatcgacgttaatctgattaggggccgtgggagattcgaaataccgtccatatctctataccacaccgcgaccagattagatactatacttctacaacgactgcttacagtactagagatcgatccgaatctctgcgttacaggtcactctccaatctccattaccgcatcccgcggatacataagcacggttacttgtctactgagtataggaagcttagagatcaatgggaggggcttcatagatccgccaatctatcaagcggctgcatacggctatcacgatatagtcaggctattagtgcaataaggcacacatctaaatatcaataaaagcacgatcgtatcttacaacactgcactctgcattactgcccgtagtagtgacttggagatggtccaggcactattgcatcataatcaaattgatgtcaaccttcggaatgaatattttgaggatccattgatgttggcagttaaggatggtcatttctcaatagttaatgctcttttagcaaataccagactcaaacgcttcagtttgaagagatcgcttgatctagcaagagacgactgcatccaaagggctattcgaaccagaatagaatccgacagcacttgtcaaacattgttgaggcggtctccgaggatgaaatttggtggtctataaaacccatctacacctctcgtgatacaatgcgagatagctgttttcagcgtcacttgacataaactctcagaattattatctatacctccacgcttcgaataagtttattcacaataaagtcacgttcgacttcaacgacttcttgatgtatagcatccaatgcatcaaagttatacttacaaactatcattaggaggtagtttatacaagtctttatttcaaggcttcatctattacgcattttcacattaaattgagtaactcggggtaaacagcagatgaaatcgagcgtcaacagttgaggtaaccgttgaggtaaccgctcactgactcttttaaaggcagtcgaactcaggccggcacggtcatgggtggcataacagcagcctcggtaggactgccgggctataaaagactcttcagtacaatgtctcttgcatttcattccaaggccacaatagaccatcccacttcgccttacccatatgaccggccagctaagagacagtgccgggtttcccacaacccagaagataagaataagttgcaaagccatccacagcaatcttcaaacggcacaatcattaaacccgaggtcggtcataccctcttcgatagcaaacgaacaagatcactaacactacataggttctagtgcgcacacccggttccctaacggcggagttcatgaagcttctacaccacaacgacgccctggctacaccagccctcaaactgctcgacttgtacttttgcctgtgggaatgctacgtcgtcaagtctgccgaggagatacgacttgaggatgagcagcgacagcttcaatggttaaatgagtggctagcaagcaatagcgacatccttctacaggtctgcgataagcagacattgatactgtaggatcgaaagcgagcagttcaagcactttgtaacggcgtcgtttcagccttgcaagcaagcgatcccaaagccttccatgttaatgggccgtgatgaggtctcggcgttgtcgagcgctcgtgggcgataacgacacctgaatagttctgctatctactgccttctatcccgaatatcatccctctttctagaggcccatacaaccgccggtgatattccgttgggtttggtgacggggtgtaaacatttcacggctgttgatacacccaacgcttagtttagggcatttagtatctggccataattcctcctaatacgtccagaccttatgcaatcaagcatagataaaacctctgctcatcctgcggcattctgtccttcccaacccccgttagatcgccagcttataaacttctgtattctccctatagtacagccttcgacggcgagttttgaaccgaaatgaatgaatcgaacaaaaatggtctgtaccagttgctttcataattatttgtgctaaaattggtagactgtgattttggatcttgaccttcacgccatctggcaagagtgctctggcataccgacaccacctccctgtctcgccaccgactccgaaaattctcggcagattccctcggatgagggtgagcctgcaggagatgagacttcagggtcgtccgtgatcgaatgccttttccatcccacttacgagaagctgtcagccttcaggtagactggtccagaccctctgtccatgtctactcaggctagcgacttgttcctctacatgtcagctttcgctttctctaacgaagtgcactgggtagagactcgactagtcctatttgatcggaaacctggcgagagtataggagagcatctgttcttcctaccccgggttgaaactgccctggggaatctctgtcgggtacgcggacagttgctagacacgatccatgattttggtgcaataggcaatagcttccgactgtctctgcggcctcgcatggaacttctacaatactcgagtcaatcgacactttctccgctaggtacgctaccgaccacactctccctggatccggagttttttgtgcataaaatattgggtggttacaagtgagaccggtccagaacataggggattgttcgcagacacaaggaatataatctgctgttcatactgtagttctccttcaattaaaacgtcattgtagtgtttctgctttaacaataggaaggataactccagatagccgatccctcactctcctcttgcattgtccggcaaccctgccagattgagtctcgaagggtggttccagtcatcgagtaccctaaccagcctctcccgggataattccaatacctgatcgaaaaagcgcagccgagacagctgcttgtcgtggcgaacctgaagaccatctctctcttttctcaggtgcgtaccagtctccttcaaagcaaggttgtcctgctctagcttctggccatcgatgtgcttggacacgcacgactcccataggcggcgatagagtccaacaagtcgagctgctggaaaggcgaacttgggatcgtcgcgctcgaggtctgctagaacctgcaagatcggttgaaatggctcggtcgccagggtgtgtcttgtttttgtttcctgttgcgaaggggagggctgcaatggtcagcaaaagcgtttgaagccgaatcgtttcacttaccaatgagacatggtcggaagtttcctgtgatttgtctttctcaccaaggatgggcaattcactgggcggctgctctcctccaatttcctggtctttttttcgagctgatttgtgcatccatcttgtccgcaggagaaagtcacggctctgaacaataccatttccatcgatccttggtgtctcttatagaatatgcagacgccggtgtgtatgggctgggttttacaatcaccacaacggtcaaccgaagcagtcaaattctgactggagttgttttacttttcagcgggctgttgacagtcaacttgatcataggatagtgatcaacgagtcggtcagggaaatttgatcgcctcacgatattgagggtcagatatgagcgctcatcggggagatatatatttcaatcggacacctctttccactctcgttgaaagtctcagaaagtcgacaaacggaacattatagaacttacagtaacctaaaaaaaaggtccaaaaagaaagcgaaaaaataacttaatgtatcttcatggtcacaagttagaaaattgagtgttgacaacgttgggccaagcttcaacgggttgacgggtcgatcacccgcacatcctactgtgacctcgctttccgcagtctagacggacagacccacagctcaacacaaccaacacaacactaaagcgaggctaggaaaaaaattccatgatttctagggataaaattgaaggcgcttttcggtgaatcaacgctgagtcgctcacagatgagatgatcacaacacaaatatgagcctgtcattgcggattgaatagtgacggaaaaacggtggtaaggcgaatgtatatgtggcagatggtattcctctcaaaattgtgcgttaggtctgatggcccactttcatcgactgttgaggagaaagtaataccgcgaaagtaagattcgtacccatcaccgaatttgcaattaaatcgctcaacgcgcttgcattctatatctccccgttttaaccacagtcaccgtctctttcataaggattgaagtgcttcgacagatgccgaaataatgggctggagatagccacggaaacgctgtgctgtacctgcggttggccggaggacctttcggtctcactagaatcaatactaccatctctaggctcgcgccgctgaatgttatttctttcctttctaatcgcagttaacttgtattgcctttactaaaatgtctactccctgggcgcataggcactggcatactttcaaactcaggataaagattgtctttctttggcataatagccaaaaagggtctagacctttgaaaagctcagacaagaaactgggtctagtttccaggacaaccatgtgaactgatgcaaccaaggcccacgagctaggttctcgagatcgccaccccctcgcaagattgcaacgctactattacactgacgagaccctggagacgaaaagcacccgaccggccaatcaaacaccacgcgtgaattcagacagatgcaggtagggttctgcgatgcagannnnnnnnnnnnnnnnnnnnnnnnnnnnnnnnnnnnnnnnnnnnnnnnnnnnnnnnnnnnnnnnnnnnnnnnnnnnnnnnnnnnnnnnnnnnnnnnnnnnnnnnnnnnnnnnnnnnnnnnnnnnnnnnnnnnnnnnnnnnnnnnnnnnnnnnnnnnnnnnnnnnnnnnnnnnnnnnnnnnnnnnnnnnnnnnnnnnnnnnnnnnnnnnnnnnnnnnnnnnnnnnnnnnnnnnnnnnnnnnnnnnnnnnnnnnnnnnnnnnnnnnnnnnnnnnnnnnnnnnnnnnnnnnnnnnnnnnnnnnnnnnnnnnnnnnnnnnnnnnnnnnnnnnnnnnnnnnnnnnnnnnnnnnnnnnnnnnnnnnnnnnnnnnnnnnnnnnnnnnnnnnnnnnnnnnnnnnnnnnnnnnnnnnnnnnnnnnnnnnnnnnnnnnnnnnnnnnnnnnnnnnnnnnnnnnnnnnnnnnnnnnnnnnnnnnnnnnnnnnnnnnnnnnnnnnnnnnnnnnnnnnnnnnnnnnnnnnnnnnnnnnnnnnnnnnnnnnnnnnnnnnnnnnnnnnnnnnnnnnnnnnnnnnnnnnnnnnnnnnnnnnnnnnnnnnnnnnnnnnnnnnnnnnnnnnnnnnnnnnnnnnnnnnnnnnnnnnnnnnnnnnnnnnnnnnnnnnnnnnnnnnnnnnnnnnnnnnnnnnnnnnnnnnnnnnnnnnnnnnnnnnnnnnnnnnnnnnnnnnnnnnnnnnnnnnnnnnnnnnnnnnnnnnnnnnnnnnnnnnnnnnnnnnnnnnnnnnnnnnnnnnnnnnnnnnnnnnnnnnnnnnnnnnnnnnnnnnnnnnnnnnnnnnnnnnnnnnnnnnnnnnnnnnnnnnnnnnnnnnnnnnnnnnnnnnnnnnnnnnnnnnnnnnnnnnnnnnnnnnnnnnnnnnnnnnnnnnnnnnnnnnnnnnnnnnnnnnnnnnnnnnnnnnnnnnnnnnnnnnnnnnnnnnnnnnnnnnnnnnnnnnnnnnnnnnnnnnnnnnnnnnnnnnnnnnnnnnnnnnnnnnnnnnnnnnnnnnnnnnnnnnnnnnnnnnnnnnnnnnnnnnnnnnnnnnnnnnnnnnnnnnnnnnnnnnnnnnnnnnnnnnnnnnnnnnnnnnnnnnnnnnnnnnnnnnnnnnnnnnnnnnnnnnnnnnnnnnnnnnnnnnnnnnnnnnnnnnnnnnnnnnnnnnnnnnnnnnnnnnnnnnnnnnnnnnnnnnnnnnnnnnnnnnnnnnnnnnnnnnnnnnnnnnnnnnnnnnnnnnnnnnnnnnnnnnnnnnnnnnnnnnnnnnnnnnnnnnnnnnnnnnnnnnnnnnnnnnnnnnnnnnnnnnnnnnnnnnnnnnnnnnnnnnnnnnnnnnnnnnnnnnnnnnnnnnnnnnnnnnnnnnnnnnnnnnnnnnnnnnnnnnnnnnnnnnnnnnnnnnnnnnnnnnnnnnnnnnnnnnnnnnnnnnnnnnnnnnnnnnnnnnnnnnnnnnnnnnnnnnnnnnnnnnnnnnnnnnnnnnnnnnnnnnnnnnnnnnnnnnnnnnnnnnnnnnnnnnnnnnnnnnnnnnnnnnnnnnnnnnnnnnnnnnnnnnnnnnnnnnnnnnnnnnnnnnnnnnnnnnnnnnnnnnnnnnnnnnnnnnnnnnnnnnnnnnnnnnnnnnnnnnnnnnnnnnnnnnnnnnnnnnnnnnnnnnnnnnnnnnnnnnnnnnnnnnnnnnnnnnnnnnnnnnnnnnnnnnnnnnnnnnnnnnnnnnnnnnnnnnnnnnnnnnnnnnnnnnnnnnnnnnnnnnnnnnnnnnnnnnnnnnnnnnnnnnnnnnnnnnnnnnnnnnnnnnnnnnnnnnnnnnnnnnnnnnnnnnnnnnnnnnnnnnnnnnnnnnnnnnnnnnnnnnnnnnnnnnnnnnnnnnnnnnnnnnnnnnnnnnnnnnnnnnnnnnnnnnnnnnnnnnnnnnnnnnnnnnnnnnnnnnnnnnnnnnnnnnnnnnnnnnnnnnnnnnnnnnnnnnnnnnnnnnnnnnnnnnnnnnnnnnnnnnnnnnnnnnnnnnnnnnnnnnnnnnnnnnnnnnnnnnnnnnnnnnnnnnnnnnnnnnnnnnnnnnnnnnnnnnnnnnnnnnnnnnnnnnnnnnnnnnnnnnnnnnnnnnnnnnnnnnnnnnnnnnnnnnnnnnnnnnnnnnnnnnnnnnnnnnnnnnnnnnnnnnnnnnnnnnnnnnnnnnnnnnnnnnnnnnnnnnnnnnnnnnnnnnnnnnnnnnnnnnnnnnnnnnnnnnnnnnnnnnnnnnnnnnnnnnnnnnnnnnnnnnnnnnnnnnnnnnnnnnnnnnnnnnnnnnnnnnnnnnnnnnnnnnnnnnnnnnnnnnnnnnnnnnnnnnnnnnnnnnnnnnnnnnnnnnnnnnnnnnnnnnnnnnnnnnnnnnnnnnnnnnnnnnnnnnnnnnnnnnnnnnnnnnnnnnnnnnnnnnnnnnnnnnnnnnnnnnnnnnnnnnnnnnnnnnnnnnnnnnnnnnnnnnnnnnnnnnnnnnnnnnnnnnnnnnnnnnnnnnnnnnnnnnnnnnnnnnnnnnnnnnnnnnnnnnnnnnnnnnnnnnnnnnnnnnnnnnnnnnnnnnnnnnnnnnnnnnnnnnnnnnnnnnnnnnnnnnnnnnnnnnnnnnnnnnnnnnnnnnnnnnnnnnnnnnnnnnnnnnnnnnnnnnnnnnnnnnnnnnnnnnnnnnnnnnnnnnnnnnnnnnnnnnnnnnnnnnnnnnnnnnnnnnnnnnnnnnnnnnnnnnnnnnnnnnnnnnnnnnnnnnnnnnnnnnnnnnnnnnnnnnnnnnnnnnnnnnnnnnnnnnnnnnnnnnnnnnnnnnnnnnnnnnnnnnnnnnnnnnnnnnnnnnnnnnnnnnnnnnnnnnnnnnnnnnnnnnnnnnnnnnnnnnnnnnnnnnnnnnnnnnnnnnnnnnnnnnnnnnnnnnnnnnnnnnnnnnnnnnnnnnnnnnnnnnnnnnnnnnnnnnnnnnnnnnnnnnnnnnnnnnnnnnnnnnnnnnnnnnnnnnnnnnnnnnnnnnnnnnnnnnnnnnnnnnnnnnnnnnnnnnnnnnnnnnnnnnnnnnnnnnnnnnnnnnnnnnnnnnnnnnnnnnnnnnnnnnnnnnnnnnnnnnnnnnnnnnnnnnnnnnnnnnnnnnnnnnnnnnnnnnnnnnnnnnnnnnnnnnnnnnnnnnnnnnnnnnnnnnnnnnnnnnnnnnnnnnnnnnnnnnnnnnnnnnnnnnnnnnnnnnnnnnnnnnnnnnnnnnnnnnnnnnnnnnnnnnnnnnnnnnnnnnnnnnnnnnnnnnnnnnnnnnnnnnnnnnnnnnnnnnnnnnnnnnnnnnnnnnnnnnnnnnnnnnnnnnnnnnnnnnnnnnnnnnnnnnnnnnnnnnnnnnnnnnnnnnnnnnnnnnnnnnnnnnnnnnnnnnnnnnnnnnnnnnnnnnnnnnnnnnnnnnnnnnnnnnnnnnnnnnnnnnnnnnnnnnnnnnnnnnnnnnnnnnnnnnnnnnnnnnnnnnnnnnnnnnnnnnnnnnnnnnnnnnnnnnnnnnnnnnnnnnnnnnnnnnnnnnnnnnnnnnnnnnnnnnnnnnnnnnnnnnnnnnnnnnnnnnnnnnnnnnnnnnnnnnnnnnnnnnnnnnnnnnnnnnnnnnnnnnnnnnnnnnnnnnnnnnnnnnnnnnnnnnnnnnnnnnnnnnnnnnnnnnnnnnnnnnnnnnnnnnnnnnnnnnnnnnnnnnnnnnnnnnnnnnnnnnnnnnnnnnnnnnnnnnnnnnnnnnnnnnnnnnnnnnnnnnnnnnnnnnnnnnnnnnnnnnnnnnnnnnnnnnnnnnnnnnnnnnnnnnnnnnnnnnnnnnnnnnnnnnnnnnnnnnnnnnnnnnnnnnnnnnnnnnnnnnnnnnnnnnnnnnnnnnnnnnnnnnnnnnnnnnnnnnnnnnnnnnnnnnnnnnnnnnnnnnnnnnnnnnnnnnnnnnnnnnnnnnnnnnnnnnnnnnnnnnnnnnnnnnnnnnnnnnnnnnnnnnnnnnnnnnnnnnnnnnnnnnnnnnnnnnnnnnnnnnnnnnnnnnnnnnnnnnnnnnnnnnnnnnnnnnnnnnnnnnnnnnnnnnnnnnnnnnnnnnnnnnnnnnnnnnnnnnnnnnnnnnnnnnnnnnnnnnnnnnntgcttctccccccccccggggggggggggggggggggggtgttcgaagccagatatcaagctttgaaatcactccattgggtgcaaaaggtactaaaccggcagctccgaagctatttctagtcgtttccgatttgaaggcttcaattcgtgcttctaggtatgccggaaggaaatcatctttatcgatatgatttcctactccgcatttttgtttcaactagccggctataggacttttttaacaccgcgaaatagctaatatcaaaaggctgtaaaagatgggatgaatgcggaggcatatagattggtataatactattttactcacaaatttcatcaaatttcgaggttaaatgaccaccgtatccgtcgagtattaaaagtcgatacctccccttcggaagtgaagaagtcgaaggaataaagagtttttgaagctatcgaattccaattttatcggaggtccaactgttcggactaagtttaaatcgctaatcatccggaaggccgtaggtctaagattcaataaagactttgcctttcaaaatcatatatagagtaagtacctaaccggaagcattcgtacactcgattaccgttatctacttatgatttctaggttataaaactagtcgccgactgtagtatttactccttgtaataaccttcgcggttactattatcctattgcgaaatcggtcttattaaagttataaatgttattagggtcgatcctaaattaaaggatggttttttgaataagtttaaaatactccctaataattttcgggtctttatatttcgtacgttcgtagttataccgttttgagaattaggaggaaagaagagggtgccgttttataaattttgtaacctaattttcgccgaccgaaataaccggggtggttccacattgttgaagaagaagatccgccatttctcgaatggtagagggccggggggctgctccacgagaatctatagagagtatctatttttgaagagattcctcttcaattctagttatattagatgaattggcgcgagaaatcgtgtggtgttggtagccgcgtagtcggtcttggagggttgaacgtggtatgttaaaacggcgcgccacttcacgaattgaagagatttcttgattcttaaaagcctcggtagctaataagattctaccctcttgctctactaaatttttagagcttcgggagtgaattggtggcatggtgggtggttgaattgactaagtgctaattcatggacgcgttttgggtggtgtggccggctcggtagtgaaatacgttactgttgtgatggtaaaactcagtatactcagtatttagtcacctgcgtctgcatagtctcttatatataagagacaccaaggtctgatggaaacggtactacccaggcctttgactttctcctgtgggcaaaatggatgccccaaaccgctcgacaggccaggaaaatgaaggagataagcagcccagtgaattgccaattcttaatgcccgtcctaagaaaaagatataaatataaggcggtcagaatttactatgggcagaatcccactctggcgcaggcggctatagactgcacgacccctgagctttgtcctcaacaagacaatatgggcttttcactaccgccagagttgacatccattattttggagtacatttcccacgacgacctccatttagccaaatatgcaacaatcagtcgcgactggcaggcgatcatcgagagcaaaacattttcatccctcaaaatcaacacccccaagcggttagcagaattcaatgagctatcatgggaccgaagaaggagctatgttcgaaaaatcgatttgattattcaactggagtcatactatgatgatgacgacgcgttcacgcgctacgaaaatgaaggggagatgcaacgaaacaacaagattttcaccacatcgatccactcacttttcattactctggccaaatggccagcaaaagaagaagccgaatttagtctttcgattgaggcccggtcccccgatgatcttctaggtcaaacccctgaggcaaagagggagcgggaaaagcggatagaagaatcttacccaagcaatgatttccaggataagagattcgaaagatcataccttcaattcaatgaggaggtcgttggtgtcaaatgcccggccgtccccacaatcacttcccttgaaatcatgggagcgataaatagaaggaaaattgaaccagcttcttgttctttcatcgtgtcgaagtttcctcgactataccgcctggtgctttatttgaatgattcttgcaaatgggacccggaactgagaaaacgccatagaaacggtatgctacataacaatgcccggtagggtatgtgctaatcggaaatctagatttcgcggattctattctactatggcctgccagtatacggcagctccaccttgacttctgctatgtggcccctttcgatcaaaactattccccagcggcttcaactgtgaaaggaaaaacagacccgctaagctcgagattacgggagttctcgcaacaattgaaagaaatgggcggggcccaatgtgtgcttggaaaagaagtattctggcccacagatgaacagaatcacaatctccagcttcccttttggccccattttaccgatctgtggttaggatacgagccggtgactccaagtggaaactggatgttcgcaaaggaagaacctcaagaatctgaagatgaggatgattatgactcgagtgacccaggctcagactatagtgagatggatgataccgataaagattggattgccccggaggaccgtatgggcaaaatattccgaactaagcccattcacgagttgttcaatgcgtattatctctcagctgccaatgccgctctttgcatgcccaagctggataatatgtttttggaggtgacgaacggctggaatcgacacaagttttggtacagggtgagggatggagtagcgaatgcgacctggtctagtggtgatgatccgaaagcattcgagccaagcgatgaagtcttacaactctggaaacaggttgcttccgcgcgtactggaggtgatcttggagttgaatttgaccttctctgaggtagaagtttcattcgatcctgcaaagcgtttacaccgacatcaatatctgcaagtcactttaggaacaaagtggctctataacgaggatgaatggtggcaatctgtgcttaatcccttgacttcttcccgatgatcatgctgcaattgacaacccacaaagagcctgcgctgtaacccggtaccattcacaaatcaataagaatatggagtgaacgctatatatactttcaatctggcttgtattgtatataatattattatcttacaagaaagaattcatattcgaatattgccagtatcccaaacttaagctattgcgccagtacaataaggtaaatctaagacgagacaccgatccagtaagcttcgttcaaccagaaactgttttcaaagaacattattagtattccacccaagtgaaccagaagggttcaacaacttacttttcgcaaacattgttcaaagccggattccaggtatctatgcgaatagttaatgtcgagcttcaacattattccgtaaatggagtctactcacaaagctgatcaactgtgatattgttacgagaagcgaacacttcgcatccatcaccgtgctgagccacatcgtatgcgttgcattcagagggaattcctgcctgggttggtgctggtggcgtcatagttgctcgggtagaggtagtcaccgcagtagagtgggtcgttatagcagtggtgggggctttcacacagtatgcttcatctacccaaaggccggcgcagttttctgtgattctgtgtgagtacaaggtacttatgtagtcggcagggatagaggatgattcgagaatatttacctccgacagccggattccatgcgttgaactgggcaagtgtgatgctatatgctgatgcaatcgccgtgcaagagtcgtttgtctgagccacgtaccactccaggcaatgggcaacaatgccagactgcgtcggggcagggggggccccggtggaagaagttgcggaagtgctagatgaagtggtgctcatgttatagctgacggtagaccagccatgtcccattacacaatactagacatattcgtataagctctgtttcggtttgacggccatgacgttgtttcttaccggggtattcatccaaaggttagtgcaatcagaccctaaaaatatgtaagaagcaaagaagacacaaccttcactgatgcaacataccaacacttggattccattcatacagtgacgtgaaaggaatgtcgtatgaccggcaaattgagtcacagtcatcgcctgtagtcaggtcctcctgatttagtattttatcgctgactcgtgggtcgacgtggactgaccgtctacagtttcataccaatcgagacattcagttgtagaattagccggggcatcagtcggaactgaagcccaaaccatcgtggaggttgaggccactggatagaagaagaatataagtatggtgtttgactcttttcgttgcaaagaaaaagactcacaagtttggttgtagaatgaaccacagtatcgtgtctcatttgtcagcttgcaattataaattgtgtagttctgcccgttcaagatactagggttccatagcaggaagtttgtcacactgacaccaaatatggacgccgcttcccaacatccaagcgcacccatgttgttattgaaagtggcaaaacatccgtccaaagagcccgaggccagtggatatgatgaagttgtcgtagttaggttgtaaacgggccgagtcgccgtgggaagattggcccaagttatggctggatcagctgtgaggcttgcgtacttggttgtggttgtggcatatccggagtaggtggctatatcaccgacagcctgtacacaataggagtagtctacggaacggaaatgagcccatccagaaacacaagaggaaggaaactagggaacacttaccgagaaagaggtttgtgcagttcgcgttgagttcagggttgaggaactcaaagtcatccagactaatcccattctggacagtgatcgaggcgcaattgtctagatcattagcaatgctcatagtgaagcgcaagataacgcaccattattcccaacactataccatttcgcacacttggcattagatccatcgacggcgttggtaggaatggaaacagcagttgcagtggtagaagcttcgaaagatgtactcggcttaacatatcccacattattgcccacacaaatcacatggtcaatcttggtgggccaattagcacagacaggatcgattgttggattccacgaaagaagctgtgtgagcgtaatcttatgagcacgtgaaacactgatgcaggtatcatttcgtcggaccaggtagggctgacaagttgcctgcacacacaggctcgtaaggtttcctggccaatttgtacagccaccaagtagtccattgaccattaaaagctgatcagttgcaaccgagtttgcctctgcaaattcatcacaagtgctgccagttggaacaggcacatatgatcctgtgcatgttaaagttgtagaagtgttgctgaccatagttcttttgatcaaggaaatatttagtcagtgaagccttactctatcaaggaggggtgcatacttggaattactgagaaatacgggcgtaggctcagccaacggcggtactgtgacaccacacgaagatgcagaggagaggtattggctagcaagccggtcaatccaccccaccgcattatcgagctgtgctctcataatgcccagaccgcaattcccgcatggatcgctttcgggctcaccggtggtgccgttcacaggcgaaaggtaacaaaatgcaggagggttggcgctgtatattcataagcaaagatatatcttgcaattggaggcaaccaacgcactcatcttgcatgcaggttacattgtagttaacaaaaaaaggatcaaccagcccgattggcttgatcgagattccttcaatattatagatatcatccttgactccagttccatagacataggaggtaccattgacgggctcgtcggtgtaaacatcatttgcacatgaggtcaagaccttcgatcggaaactggtgattgaatcgaaacacgctatagtgcacagagccgtgatattctctgcgctgagtccgctttgaaagtcggaatctcgaatgatatccgaacaatctacggtgctagctaatgcagcagcacaatcacttgaaaacatagtcaagtcggagatattgaagaatcctgttggtacagacattgtcgcggtgtctgccagcagcatatttgtgtggggagttgctacggtcgtcgctgcttcaagtaaagttgtagaagaaagcgcatctcggcgatggtgagccctttgatgcgcagcaatgtggtcgtggggacttgcgacgacaaatggtatacaaatggggagaagacccaatccaagtacttgacaccaaagtggtgtcatgaagagccgcatagtataccaagtgatgggaatgaaggagagttgggagacatatgctggctcaatatagcaaagaaagagggaaaacgtatctttcgctccatcgaacattctaatttcctcgtttaaccatgctcgcctgtggatcccacggacctacagatttctccgtcactagatacgatattttactccctaagctccattcaccgcgctgtgtagcgtgaacatcaagaatccgctgtttcgcaatcttaagtcagttgatacgacactgcgtttgttggggccgaggagccggatggtgattggtatccgactttggctggtaaactaattggtttcaagatccttgattactggttttagccccattcaattctacaaagtaaagacactacataaatgactccactagtggctccacacttgtgtcgcagttgcaagaaggtccacatgaatctgctgcggtgttctggcttttttaacatgactgcgcgctctttgtttttattttattttaaatcgctagcaatgagatgtacaatgtattgcatgcagggtactcaaccacgggaagcaaacagcatgattatatgtataggatttgtgggcctcggcaacgacggaagaccttgcccatcaggggtagtagaaaatattacctttcaacggacccttcataatgcatttctcggttcatgtccgaagggcggaattcatacaacagatccgtatggaaaaaaagccaaggaggccaagcaaacttggcccccgataaggatgaaaatcaagagaaaacgtaggcttatccttattggcgtgtggctggctttgggggccaaaatactactaactatatccactctcgcaatctattccgcttcacactaatccctcaaagaatccgtggacgttggcccactttttagttcttcgtttacattaatatcacgcaataaaaaatggttcggctgctagcttgctatcgatggattgtatctgccaccgattgtcctgtctcgatcaagaatcaagagacagtggggcaggcaaatctcgggaatggatgctgcggacggagtcgcagtcggggtgaccgttagtctaacgctactgtaattgcgataacttgaatctatttagccccgagagcaaagacaactcgccctctcttctatataggaaatcatagagcctaagtacatataaaa

SEQ ID NO: 123 - DNA, 14606 bp, Penicillium roqueforti
  misc_feature (1549)..(7460): n is a, c, g, or t
taccagcactccatctaccagcactccatctaccagcacttcatctactactactacgaaagatagccatctcactatcgtcactgttgcttctgtcactagcacttctactagtattgtttgggtcacagtgtagatagtggaggttacacacacacacacacacacaatttattaacgcccggccactaagcggaaagggcaactatctctgatctactatacatgtcataatagatatagtactgtgtctcctcaaagcccatacaaaaagccttgcaatatatgtcatctcagatgtccgtattgcagcggatcctcgtgggttagtaattttgttagtagactggcttgaaggcgcttctccaagtgttcaacatcctattttcggcagctgaagcgcgtctaccatctgtaaggcgaggtggttggtgggtcagatcggcgaaagggggtgatttatgttcgttggcatggttaggtggcctcgagtcggcccgtggcgatggcgaatcgtattgaggcccgtaccgcctctaagtttggcgtccacttctgatcatcggaaggcgactttcctcctagaaagaaggatatatttctcggtgagtgttggtacattgtagtagttccgtccagtgcgccgtccatttttgacatcgaaataggaagtgctccacggtctctctcgcttgtccacacgcacactggtccgtgtctgctacgttgattcgatagagatatccattgagtcttgccagccagcacgctcgcttctttccacgataatcggtcatatagctgccgggtgtcaagtattgatttgtattactaagttgggcacgcttgataatacattgtagaggcggcagcatgtctacctacatagaccctctccattgcatccccttcgatcctcatccgcatccttcacggggcacagccagttccgcaagtcaataccagtttgcaccttaagcctacttccatagcggccttgaagtctccatcctcgaagccatcttcaaaatcctattctctcagtagaccgacacgcgcgtccgtcctctcgagccatatagaaagtgtcgtatctgcagtccgcccacccagtcttccgtcgcttccattatatgctgcgccccgcggattgtcaaatccatttcgcgctaccttgcaagatctctttgacaaggccgaccatgtctcgcaggagtttgcccagttgtatcctctctgtacacagagcagccaagcaacacagtgttgtccctcccaccaaccaaactacctcgtcgttctctgtgtggattcaaggatgctgggtcgtgtcgtgtcgttcgtggttttgcttttggctctgtcgtttgtgtatcctcagacccagcgatatcctcctttcaacagagcagcccgagagcaccccaagggtgtcctatcccacgaccctagtgtccactgattgtaggatcggtttcgcagtcgtgtgtcgggtggttttcaaagtgttcccttgtcgcctgtgcgtgggggcagggcccccgacccnnnnnnnnnnnnnnnnnnnnnnnnnnnnnnnnnnnnnnnnnnnnnnnnnnnnnnnnnnnnnnnnnnnnnnnnnnnnnnnnnnnnnnnnnnnnnnnnnnnnnnnnnnnnnnnnnnnnnnnnnnnnnnnnnnnnnnnnnnnnnnnnnnnnnnnnnnnnnnnnnnnnnnnnnnnnnnnnnnnnnnnnnnnnnnnnnnnnnnnnnnnnnnnnnnnnnnnnnnnnnnnnnnnnnnnnnnnnnnnnnnnnnnnnnnnnnnnnnnnnnnnnnnnnnnnnnnnnnnnnnnnnnnnnnnnnnnnnnnnnnnnnnnnnnnnnnnnnnnnnnnnnnnnnnnnnnnnnnnnnnnnnnnnnnnnnnnnnnnnnnnnnnnnnnnnnnnnnnnnnnnnnnnnnnnnnnnnnnnnnnnnnnnnnnnnnnnnnnnnnnnnnnnnnnnnnnnnnnnnnnnnnnnnnnnnnnnnnnnnnnnnnnnnnnnnnnnnnnnnnnnnnnnnnnnnnnnnnnnnnnnnnnnnnnnnnnnnnnnnnnnnnnnnnnnnnnnnnnnnnnnnnnnnnnnnnnnnnnnnnnnnnnnnnnnnnnnnnnnnnnnnnnnnnnnnnnnnnnnnnnnnnnnnnnnnnnnnnnnnnnnnnnnnnnnnnnnnnnnnnnnnnnnnnnnnnnnnnnnnnnnnnnnnnnnnnnnnnnnnnnnnnnnnnnnnnnnnnnnnnnnnnnnnnnnnnnnnnnnnnnnnnnnnnnnnnnnnnnnnnnnnnnnnnnnnnnnnnnnnnnnnnnnnnnnnnnnnnnnnnnnnnnnnnnnnnnnnnnnnnnnnnnnnnnnnnnnnnnnnnnnnnnnnnnnnnnnnnnnnnnnnnnnnnnnnnnnnnnnnnnnnnnnnnnnnnnnnnnnnnnnnnnnnnnnnnnnnnnnnnnnnnnnnnnnnnnnnnnnnnnnnnnnnnnnnnnnnnnnnnnnnnnnnnnnnnnnnnnnnnnnnnnnnnnnnnnnnnnnnnnnnnnnnnnnnnnnnnnnnnnnnnnnnnnnnnnnnnnnnnnnnnnnnnnnnnnnnnnnnnnnnnnnnnnnnnnnnnnnnnnnnnnnnnnnnnnnnnnnnnnnnnnnnnnnnnnnnnnnnnnnnnnnnnnnnnnnnnnnnnnnnnnnnnnnnnnnnnnnnnnnnnnnnnnnnnnnnnnnnnnnnnnnnnnnnnnnnnnnnnnnnnnnnnnnnnnnnnnnnnnnnnnnnnnnnnnnnnnnnnnnnnnnnnnnnnnnnnnnnnnnnnnnnnnnnnnnnnnnnnnnnnnnnnnnnnnnnnnnnnnnnnnnnnnnnnnnnnnnnnnnnnnnnnnnnnnnnnnnnnnnnnnnnnnnnnnnnnnnnnnnnnnnnnnnnnnnnnnnnnnnnnnnnnnnnnnnnnnnnnnnnnnnnnnnnnnnnnnnnnnnnnnnnnnnnnnnnnnnnnnnnnnnnnnnnnnnnnnnnnnnnnnnnnnnnnnnnnnnnnnnnnnnnnnnnnnnnnnnnnnnnnnnnnnnnnnnnnnnnnnnnnnnnnnnnnnnnnnnnnnnnnnnnnnnnnnnnnnnnnnnnnnnnnnnnnnnnnnnnnnnnnnnnnnnnnnnnnnnnnnnnnnnnnnnnnnnnnnnnnnnnnnnnnnnnnnnnnnnnnnnnnnnnnnnnnnnnnnnnnnnnnnnnnnnnnnnnnnnnnnnnnnnnnnnnnnnnnnnnnnnnnnnnnnnnnnnnnnnnnnnnnnnnnnnnnnnnnnnnnnnnnnnnnnnnnnnnnnnnnnnnnnnnnnnnnnnnnnnnnnnnnnnnnnnnnnnnnnnnnnnnnnnnnnnnnnnnnnnnnnnnnnnnnnnnnnnnnnnnnnnnnnnnnnnnnnnnnnnnnnnnnnnnnnnnnnnnnnnnnnnnnnnnnnnnnnnnnnnnnnnnnnnnnnnnnnnnnnnnnnnnnnnnnnnnnnnnnnnnnnnnnnnnnnnnnnnnnnnnnnnnnnnnnnnnnnnnnnnnnnnnnnnnnnnnnnnnnnnnnnnnnnnnnnnnnnnnnnnnnnnnnnnnnnnnnnnnnnnnnnnnnnnnnnnnnnnnnnnnnnnnnnnnnnnnnnnnnnnnnnnnnnnnnnnnnnnnnnnnnnnnnnnnnnnnnnnnnnnnnnnnnnnnnnnnnnnnnnnnnnnnnnnnnnnnnnnnnnnnnnnnnnnnnnnnnnnnnnnnnnnnnnnnnnnnnnnnnnnnnnnnnnnnnnnnnnnnnnnnnnnnnnnnnnnnnnnnnnnnnnnnnnnnnnnnnnnnnnnnnnnnnnnnnnnnnnnnnnnnnnnnnnnnnnnnnnnnnnnnnnnnnnnnnnnnnnnnnnnnnnnnnnnnnnnnnnnnnnnnnnnnnnnnnnnnnnnnnnnnnnnnnnnnnnnnnnnnnnnnnnnnnnnnnnnnnnnnnnnnnnnnnnnnnnnnnnnnnnnnnnnnnnnnnnnnnnnnnnnnnnnnnnnnnnnnnnnnnnnnnnnnnnnnnnnnnnnnnnnnnnnnnnnnnnnnnnnnnnnnnnnnnnnnnnnnnnnnnnnnnnnnnnnnnnnnnnnnnnnnnnnnnnnnnnnnnnnnnnnnnnnnnnnnnnnnnnnnnnnnnnnnnnnnnnnnnnnnnnnnnnnnnnnnnnnnnnnnnnnnnnnnnnnnnnnnnnnnnnnnnnnnnnnnnnnnnnnnnnnnnnnnnnnnnnnnnnnnnnnnnnnnnnnnnnnnnnnnnnnnnnnnnnnnnnnnnnnnnnnnnnnnnnnnnnnnnnnnnnnnnnnnnnnnnnnnnnnnnnnnnnnnnnnnnnnnnnnnnnnnnnnnnnnnnnnnnnnnnnnnnnnnnnnnnnnnnnnnnnnnnnnnnnnnnnnnnnnnnnnnnnnnnnnnnnnnnnnnnnnnnnnnnnnnnnnnnnnnnnnnnnnnnnnnnnnnnnnnnnnnnnnnnnnnnnnnnnnnnnnnnnnnnnnnnnnnnnnnnnnnnnnnnnnnnnnnnnnnnnnnnnnnnnnnnnnnnnnnnnnnnnnnnnnnnnnnnnnnnnnnnnnnnnnnnnnnnnnnnnnnnnnnnnnnnnnnnnnnnnnnnnnnnnnnnnnnnnnnnnnnnnnnnnnnnnnnnnnnnnnnnnnnnnnnnnnnnnnnnnnnnnnnnnnnnnnnnnnnnnnnnnnnnnnnnnnnnnnnnnnnnnnnnnnnnnnnnnnnnnnnnnnnnnnnnnnnnnnnnnnnnnnnnnnnnnnnnnnnnnnnnnnnnnnnnnnnnnnnnnnnnnnnnnnnnnnnnnnnnnnnnnnnnnnnnnnnnnnnnnnnnnnnnnnnnnnnnnnnnnnnnnnnnnnnnnnnnnnnnnnnnnnnnnnnnnnnnnnnnnnnnnnnnnnnnnnnnnnnnnnnnnnnnnnnnnnnnnnnnnnnnnnnnnnnnnnnnnnnnnnnnnnnnnnnnnnnnnnnnnnnnnnnnnnnnnnnnnnnnnnnnnnnnnnnnnnnnnnnnnnnnnnnnnnnnnnnnnnnnnnnnnnnnnnnnnnnnnnnnnnnnnnnnnnnnnnnnnnnnnnnnnnnnnnnnnnnnnnnnnnnnnnnnnnnnnnnnnnnnnnnnnnnnnnnnnnnnnnnnnnnnnnnnnnnnnnnnnnnnnnnnnnnnnnnnnnnnnnnnnnnnnnnnnnnnnnnnnnnnnnnnnnnnnnnnnnnnnnnnnnnnnnnnnnnnnnnnnnnnnnnnnnnnnnnnnnnnnnnnnnnnnnnnnnnnnnnnnnnnnnnnnnnnnnnnnnnnnnnnnnnnnnnnnnnnnnnnnnnnnnnnnnnnnnnnnnnnnnnnnnnnnnnnnnnnnnnnnnnnnnnnnnnnnnnnnnnnnnnnnnnnnnnnnnnnnnnnnnnnnnnnnnnnnnnnnnnnnnnnnnnnnnnnnnnnnnnnnnnnnnnnnnnnnnnnnnnnnnnnnnnnnnnnnnnnnnnnnnnnnnnnnnnnnnnnnnnnnnnnnnnnnnnnnnnnnnnnnnnnnnnnnnnnnnnnnnnnnnnnnnnnnnnnnnnnnnnnnnnnnnnnnnnnnnnnnnnnnnnnnnnnnnnnnnnnnnnnnnnnnnnnnnnnnnnnnnnnnnnnnnnnnnnnnnnnnnnnnnnnnnnnnnnnnnnnnnnnnnnnnnnnnnnnnnnnnnnnnnnnnnnnnnnnnnnnnnnnnnnnnnnnnnnnnnnnnnnnnnnnnnnnnnnnnnnnnnnnnnnnnnnnnnnnnnnnnnnnnnnnnnnnnnnnnnnnnnnnnnnnnnnnnnnnnnnnnnnnnnnnnnnnnnnnnnnnnnnnnnnnnnnnnnnnnnnnnnnnnnnnnnnnnnnnnnnnnnnnnnnnnnnnnnnnnnnnnnnnnnnnnnnnnnnnnnnnnnnnnnnnnnnnnnnnnnnnnnnnnnnnnnnnnnnnnnnnnnnnnnnnnnnnnnnnnnnnnnnnnnnnnnnnnnnnnnnnnnnnnnnnnnnnnnnnnnnnnnnnnnnnnnnnnnnnnnnnnnnnnnnnnnnnnnnnnnnnnnnnnnnnnnnnnnnnnnnnnnnnnnnnnnnnnnnnnnnnnnnnnnnnnnnnnnnnnnnnnnnnnnnnnnnnnnnnnnnnnnnnnnnnnnnnnnnnnnnnnnnnnnnnnnnnnnnnnnnnnnnnnnnnnnnnnnnnnnnnnnnnnnnnnnnnnnnnnnnnnnnnnnnnnnnnnnnnnnnnnnnnnnnnnnnnnnnnnnnnnnnnnnnnnnnnnnnnnnnnnnnnnnnnnnnnnnnnnnnnnnnnnnnnnnnnnnnnnnnnnnnnnnnnnnnnnnnnnnnnnnnnnnnnnnnnnnnnnnnnnnnnnnnnnnnnnnnnnnnnnnnnnnnnnnnnnnnnnnnnnnnnnnnnnnnnnnnnnnnnnnnnnnnnnnnnnnnnnnnnnnnnnnnnnnnnnnnnnnnnnnnnnnnnnnnnnnnnnnnnnnnnnnnnnnnnnnnnnnnnnnnnnnnnnnnnnnnnnnnnnnnnnnnnnnnnnnnnnnnnnnnnnnnnnnnnnnnnnnnnnnnnnnnnnnnnnnnnnnnnnnnnnnnnnnnnnnnnnnnnnnnnnnnnnnnnnnnnnnnnnnnnnnnnnnnnnnnnnnnnnnnnnnnnnnnnnnnnnnnnnnnnnnnnnnnnnnnnnnnnnnnnnnnnnnnnnnnnnnnnnnnnnnnnnnnnnnnnnnnnnnnnnnnnnnnnnnnnnnnnnnnnnnnnnnnnnnnnnnnnnnnnnnnnnnnnnnnnnnnnnnnnnnnnnnnnnnnnnnnnnnnnnnnnnnnnnnnnnnnnnnnnnnnnnnnnnnnnnnnnnnnnnnnnnnnnnnnnnnnnnnnnnnnnnnnnnnnnnnnnnnnnnnnnnnnnnnnnnnnnnnnnnnnnnnnnnnnnnnnnnnnnnnnnnnnnnnnnnnnnnnnnnnnnnnnnnnnnnnnnnnnnnnnnnnnnnnnnnnnnnnnnnnnnnnnnnnnnnnnnnnnnnnnnnnnnnnnnnnnnnnnnnnnnnnnnnnnnnnnnnnnnnnnnnnnnnnnnnnnnnnnnnnnnnnnnnnnnnnnnnnnnnnnnnnnnnnnnnnnnnnnnnnnnnnnnnnnnnnnnnnnnnnnnnnnnnnnnnnnnnnnnnnnnnnnnnnnnnnnnnnnnnnnnnnnnnnnnnnnnnnnnnnnnnnnnnnnnnnnnnnnnnnnnnnnnnnnnnnnnnnnnnnnnnnnnnnnnnnnnnnnnnnnnnnnnnnnnnnnnnnnnnnnnnnnnnnnnnnnnnnnnnnnnnnnnnnnnnnnnnnnnnnnnnnnnnnnnnnnnnnnnnnnnnnnnnnnnnnnnnnnnnnnnnnnnnnnnnnnnnnnnnnnnnnnnnnnnnnnnnnnnnnnnnnnnnnnnnnnnnnnnnnnnnnnnnnnnnnnnnnnnnnnnnnnnnnnnnnnnnnnnnnnnnnnnnnnnnnnnnnnnnnnnnnnnnnnnnnnnnnnnnnnnnnnnnnnnnnnnnnnnnnnnnnnnnnnnnnnnnnnnnnnnnnnnnnnnnnnnnnnnacacacacacacacaattcattaacgcccggcggctgagccgaaagggcaactatcgctaaactactatacatgtcatagtatatacaattctgtgactcattggagcccatacacaagaccttggcgtatttgtcattctcagcatgcagtgtcgcagcggatgctcgtgggttagtaagttggttagtagactggcttgaaggcgcttctccaagtgttcaacatcctatcttcggcagttgaagcgcgtctaccgtctgtcgcagggggttggggttagtaagatggtgattttgtccgttcgtcggcaaggttaagtggcctcaagtcggcccgtagcgatcgcaaatcgtattgaggctcgcactgcatccaaattcggcgtccacttctggtcatcggaaggcaattttccacccaagaagaaggagatattacttcggtgagtgtgggtacattgcaacatttccgtccggtgcgcggtccacttccgacatcgaaagagaaagtggtccaccgtctctcttgcttgtccacatgcacattgatctgtctcggcggcattgattcgaaagagatatccattgagtcttgccatacccgtgcggagttgggctaacacgcttgcttctttccacgatagtcggtcatacaactgtcgcgtgtgttttcctggaagggctttatccactcgtctcgaatgtttcccgatgctctcgggtagcttactgctggggattgcttgggtacgcgcgatctttagagtcgtcgatttcattttcgggacctgtccttgcaaaaaatatatacagtagtattcgaaatcagctataccttttcactcttgcgacttgattcccggaaaataaatccgagggttgtgagttctgattggataggaagcgaaggcgccgcctttcagaccgctttctagattgataggagtatcttacaatacagtattaagacatgactagacgtattttacaggaaagtgctatacgcttgctacctggtatgcccctcaattcatgcacaaggcagattcccccccgtcaccatccggctttctgcgacatttcagtgttcaatatcaggcaaaacgacatggctcctagactccctacttcgaagctccatctgatccgtgatatgatagaaagccagtccttcaccacgtctcagatggccgaagaagctgaatgtaccaggcttacgatcattaatattcgcagaaatctacgccaatttggagccatccatgcccctcaaacccgaatcggccgaaaacgaaccgttacaccgctgatgataaatgctctttgtgaccacctttccgagaagcctggtctctacctcgatgagatggcggtcttcttgtgggatgagtttcaaaccatgattacaacctccagcattagaagagcccttgtagcaacaggttggtcgaaaaaggtagtgcgccagcgcgctaaagagcagaacgcggacttgagagactactacctacacaatttatcggagtttcagtcgtatcacctgatatatgttgatgaatctggatgtgataaacgggtcggattcaggcgcaccggttgggcacctcttggcaaagctcctctgcaagtaacacagttccaccgcgaccagcgatatcaaatactacctgcgtatactcaagatggaatcctcctctcgcgtgtatttcgcggctctacagatgctactgtgttcgagggcttcatatcccagcttctgcagcattgcggaaggtggccagagcccaaatctgtcctcgtgatggataatgcatccttccaccactcagagcggcttctacagatgtgtgaggaggccggggtgaaattagtttacctgccgccttattcgccggacctgaatccgattgaagagttctttgctgagcttaaaggtttcatcaggcgtaattggaattactatgaaagagaccctagtcaaggatttgatgttttcttggaatggtgcatcaatgtggttggcgcaaaagaagaaagtgcccgaggtcattttcgtcatgcaggcttaaaaatcgaaaatattggagcttaaagatcaggcatgttgtgttcgatatgcgtcacaagtggaagacaaagaacgtcccacagtaacaatcaaaatcgcattttcctctgtgctgtcctggagtcccccggtgcccaaattgaacgcacaattggactatggtttcggccgcttggctcataataaacaaacgttcactgtttaccatataatagttgcaacttgggaagttagattgtagataatgcaagaattctcaactactttattgatctatacagctgtttttctgtaaaagcagaccaaaagcagacactaaactagaataggtgaaaccttcagattggtattgatcctagcctaacaattgagaagcaggtagctagattatagagtccagttggtttcttcggctgcaagcatccctagataccatatgcccattagcacagtgaggtgaccatggcctccagctgtccaggggattgacatagagacggctagactgccgtttgtatcgagacgtttgaccccaatcagctcagtgttggtaagcacaaagccgtggcgcactttgtgttggcccatatagaaattgacctgtgaaagaacctgcttgtattgttcttgaaagatggggttttgcgaatggcggtagtcagaacgccatttccacgagaccttcatatcccctggggcccggttcgtgctgtcggcgtaggtgcccccgagagtgacgaaggcagtgtctggtcgaaactggtcgacgtacgctgctgagcctccaccgtcaaaagtgatcggcacaaggcttagttgcttaagccggggtgcgagctcctcgaacccggcgcgcagtgcgcgcctgacacggggttgaagcagctcggcaaatcgaagatgaaaatgaggttcatccctaatggcggcaggaggggacctgaagggatcggatgcgatctgctttgagttcaaaaagccgccatatcgttgaatgatcgttgcataattgaactctggccaatcgacgacctgggtgatgtcttccgccccatagcgggggttcgttgtattccgcgatggggcagagccttgaataggaattgccgggagggaaatagagagatactgtaaaagagattggttgttcatattgcagtagtagagtaccacgtctggtgaatatgacttaggagtaatagcctcaggtggtggatacctaatgatagctgatcgtcgagataggcaagaagaatcaggatagagaaataaaatgatgggcttgggaggaaaggaaaatatagggagaatatccgatccaaaattacacatatatctgataggcaatcaatagcgatgtttttggatatagttgattggtgtgactactacagtaagcgctctcacttgaagtgtatcccttggcataagcagagtgaaagaaaacgacaagtgaaaccccgagcgaaccttggatttagagatgtggtgaatctagtggctcaagaggtcttgaaaaaaaaagcgttcattggaaccctggatcaggatcatagtcgatggggcctcaagcacccgccttctcgtttcagtctcagagggcgcttacatgcagccactgaaaccgacccactctgatatttcctcctaccagcggcaacgtagtggatttgattcgcgaggtctgggtttgggatccacatgacccaaagtcaaacttacataatccggctattagtaaccaagacctgtcccattttcgttgcctgacctgcttcaacctctttggaaacgtaacttttcgacaggacaacaatgcatctaagaagtgcttccttaacggacatggatccctccagaatccatataatcagggagattacgtgctctgatgcatcttcaatattcgaggtagatatggatggacaaaagtatgctttgaagcttttccacgacaacggcgaccctggatataccgaaaaaggtcgtgatttgaaccgatttcgctgcgaactcaatgcatataagaagcttttcgcctctggtgtttgtgcgcgcagtttcgttccaaaattctacggctacatcaatcgaatggatcccgcagcacttcatcctgctttccaacacctctctcaagacaagctcaagccgagagcaatattgccagagtacctcccaaatgcagagagtataaactgcattaactacacggatgcgctctatcctcaggcaattgagggcatgaaggagatacacagggcgggcgtttaccgcaaagacatatacccgagaaatattctccttgttcgtagagaccctgataggctggtctggattgactttgatgttgcaacgactttcaccgactttggacctgaagagcttgcccgctgtgactacgaaattgcgcttgcgaagggatttggagatgcactggtaaggactccgctgctccctatgttggaagcagttagcgtgctgactgacgaatgcagagagatgataggctgtgggactcccgcctaatacaaaattctattaaggattctataggcctacgaatattccgacaatgtttgatcgcgttcatatgtacgttcttgtaatagatgagttgggcagagctctgagtatgggctgttttcattcggcttactttattttacttcattcttaaaatgtggggttatgtaccgtacagagaaatgcagacctttagaaacccaaagatgtcaagacctgcggcgagacatgtccatcgtagattagaattctatcacgatcgtctaaggggcgcaccgatactgtaggacattaaccgcaaaattcttgtttcttcaccatccgcacctgctacggtgtgtctcgaaactggtgtacccttgtacacacttcaagagattctcgagccccacctgccaatatacactagtctacgttggaaattcttccgagtacccctgttagaatgattctgttgattcaagcaaggccatatctccagaggtcaagaatggataattgacatgactggaggttctctcgagaccatcctttcttcagcctcacttttcccatgctctcatttgccccattggtattcgaatttcttgaattcaaatggcttgtattcaactgtggaaaggggtagcgcttgtctgaggctggacgacacactcaaatacttttccatagtcgctatacataattcagcagcaaacgctggatatgctttcaagagatcgtaatcaatccccggggtcagccctccttgaagttctcgcaggtttttcacaatcagtttgttcgctagcttcctaatatctcggtagtcggcatttgttgaatagagttccttgattgcctgcgccaagatttgcttttcggagcaattttcaaatgaatctcgaaagttctcttctgctttgatcttcagatcttcgatcatgaagtaatccgcttctccatacatgcggagatggaagtagcatgggtggcaatcagtcaatgattcgtcgatagcgtccatttgctcgctggagcctgtcagggggccctcgccagctactgaagtctttttgttcactgagcattggttcataagactcgctgtaggttgatttgacagtgacattgcagtttcaccaacggcaccctccccagctgaaaggttctccatgtcatcttggtctttttgagagagtcgcaaagcctcttccgaatgccatgtatctgattctggtattttgtcgctatcgcttggtaaaatctgaacttcagtcatattgtcttgaactgtgtagtctcccgtgtaaagaaactctagcatcttctcgactagtgtcgggcttctagtatccaaagtgacagatccccgggattcctgtgagtcagtcacataagcttcggtctgagtgttccacaagattctgcctgaatttacaatacctcgaaagaaccacaacaggcgctttgaaaatacttggatctgggacacagaacaagcttatgagctgggaagactcgaccttggcaaaagatcttgagatcgctgtaatcggggttgaggtggaggctttgtgaagatgagcggaactcaagagtaaaaacttgccattactctagagaatctttatagttcttacctagcaatgatacccaaaacgacatcttggtactgtctctgttgcattttatcttgaatgacggcagtgggcttaggggggtcaggagcaggatcactgtccgttgatgaccttgatgaattgtgtcttctgtttcttctgttaaccatagtttggaaataatagaaaataccaaaaattagtcggttaagcggacgtacggcgagacggcaagtaagctatatgtctctgaaaactgcgcgccagatgcacagctgcccgaccccgccttttggttgaacaacaccagcaagtcgtgttcgtgactcaccgctggactgataggagggatctcttagggattcgacgtatcatatataaggcagttcgctccggtaatattcattgttgttagaaggggtgtgggtcatcccctaaaggcagaaaatgccagtgaggactctattgacatggtcatgtgttagcttccaccaaggatatggtcagcaagtagacaaagtagtggctgacaggctaaatactctgacaagtaggtgcataagtggtctgtagatacagcacagtaagaaaaaaatatgtcacttttcttgagctttggtgccgggtaagagccccagaccgtcactcggacataagagcggcaaggagatgtgatagctctccggattaccgaggagtctccagctcttttgtttaactcatttgcattgggatggaaaattcaagctacttttggattcccaatatggcaacaagggtacagtatttcgtgaaaggcgaatgatggattgggactaatacaggaatattaatattccggatttatccctgatacagactagcttacattttgaagtggggccgaggaatttctcaaagtagaggatagtgcaccggtttcgagacgtactgtatagctcgtacagtat

SEQ ID NO: 124 - DNA, 12359 bp, Penicillium roqueforti; identical to SEQ ID NO: 28
  misc_feature (511)..(6228): n is a, c, g, or t

SEQ ID NO: 125 - DNA, 10213 bp, Penicillium roqueforti; identical to SEQ ID NO: 29
  misc_feature (1520)..(7152): n is a, c, g, or t

SEQ ID NO: 126 - DNA, 9539 bp, Penicillium roqueforti; identical to SEQ ID NO: 30
  misc_feature (2691)..(6780): n is a, c, g, or t

SEQ ID NO: 127 - DNA, 9417 bp, Penicillium roqueforti; identical to SEQ ID NO: 31
  misc_feature (1273)..(7734): n is a, c, g, or t

SEQ ID NO: 128 - DNA, 9012 bp, Penicillium roqueforti; identical to SEQ ID NO: 32
  misc_feature (3461)..(7884): n is a, c, g, or t

SEQ ID NO: 129 - DNA, 8768 bp, Penicillium roqueforti; identical to SEQ ID NO: 33

SEQ ID NO: 130 - DNA, 8559 bp, Penicillium roqueforti; identical to SEQ ID NO: 82

SEQ ID NO: 131 - DNA, 7388 bp, Penicillium roqueforti
taggataaatactattattttttatccctaatatagttagattatataactaattaggctagtttttctatagaaaaactaacttagaaggctttccgcccaaaaaactagtcctacagtttttcgcctaaaaaatatcctttcttttattttatttattttaattactaagttatctattagattattatgttttaggactattattagttttagagagttagagaattgattaagatttttctgccatatgaacattcgccttaccaccgttttttgtcaaataactctacgtctatagtcggataggttaccttattaaagctattcttctattacacagatacactgtgataattaaggctactacggcggagaagcagtatctcctttaagtggaagtagacaattattataaccttaggagcttacagggataatagatccctgtctaccttaggacctttataccctatgttatatattagtactatggcaaattaatggcgcagatgatgatactaagctggtctagaacgcggctttagtatattattaacaataaaaattctagcttctttcactgggagcgcgacaaagctctagctgtactccggtcgcacagagttgtccacagcgatagtaagtggcgtaatatgctataggatgacctagatggccgtttgtttatcattgacttagaggatgtgaaatggctaaagtgtcctcgaactctagaaccaacctctggcaacatgcagtatggtcatcgcgtcggggcggggaaaagcaaacaaaggctcctatttagctcaactgccgtctgcacatgacatcagttaacgttggcgtctgtaccttcagatcacgtcatatgcccgtgaggcctagggcataatgaaatatagtgttgattcagctggcgtcttggttttgctaggagattcaaaggccgaacaaggctatcaaagctttgggagtcatccacgaagatcttcggcgtgtcaatgtcctttggaatgaaaagctcgggcgggcattaattagcgactttcaccactctaggttgaaatgtccgccagctcctaagcgatcacgatcaaagagacaacgtttacaaacagagtcagaagatgcaaagcgtttacgtgatactacagcctacagccctgaagcacacaagtccggaatccgattcggcttatgaaggcacggttcacatgaagaaatatttgatatataacagagtgggcgatagtagcatcgggaataggcaccgtggcgaataggtagcggcgtgacgccagcgctacgacacctacagatggaaaaaggaaagactggttttgacattacttatttcaggaatgggtcacaatggcagcgagagagcagggcatcggcggaacccattttctttgcatcacggccggttcaggctatatctggtcctccaaatctagcttcttatgtcatcataataaggattggccacttgaggtggttctgatttgactcggatattgctccgaacccagaaacacaacaccagagaccataagcggagtaccactgtctggagtatgacaacgatcatgcaagatactagactgatactagactatagatgccctggatgagtcgctctcaacgtcaatctcgcagaaccatggatcagctaagattttcgcaggcgaaggtctcttcgcgggatcatattgcaaaatccatcgaatgagtgccttcactttgtgggcttcctcctcatcaagatccaggcctgtccgatcgaatgactcttccatggatgtctgctccaccataagcggttcctcccccggagcgactcctccaagctggcaattaaagagcttcctctcgggcgtaaagtagagagacgaggtcgtccaatgcttgtataactcgtcggggagggcgccgagctgggcggtgagggagagaagatgatcgtcatcttccatctcggaagatggtatacagaagagtggctgtccggtgataagctcaaagacaaggcaaccgaaactccagatatcaacggtattatcgacggctccggtaagaataaactcgggagctcgaagaccgagtggagtaacgggctttgctggcgggtcggtaaagaaatatgctatccaaggcagtcaggtatgagtatagatattcgtcaagaaaaagggacagataatcgaaacgggagggactgaccaccgcccatatcggataatttgaccttaaacccctcggcgtagcaggtaaagggcactagtggctgcgcaacgcaaagatatcgaggagcccatccatcttgtttaccgtctagcctctgcacgggaggcgagatcgaccgggattgcacatcttcctcttgccggagtaagtcctcaggcgtcgagtcgatatcgttaagagtgaagagtatgtttcccggctggaagtctccatgggcgataccattttcgtggagaaatacaagggcctgcaaggattgcttgaggatgctctttgccatctgaagcggatagcgaatcttcatttctcgcctacgaggtttgaactgcggcagctcctcgaccatagtattcacactcggacccatgggctcaaataccaggcacttgtggacaccattgggcccgcggtgctcgaactcacctagcagtcgcgtgatatatcgggtcccttctaccggtgcaacttcgataatgtggcgtaagattcgtagctcggttgtcgatcccgagatttccgacacaaggatctttagggcgacatatccactatttcttaaaggaaatgagtaacgataatctatagcatcgtgggtagaatattcaaaagatgaccttactccaggtcacgggcgagccaaaccgttgagtaggagccctcgccaagtttccggatgaccttgtactggcggttgaagacgtcgccgagaacgactggatgataaccacctgggcggtaatcttccacccactcacagggtaatgtaatagttttgaatcgcagttcgccatctattaaggcccttgatggcggagtgggaggagacgaggtactcatggctgcgctgcgttgtccgagagttgccgaccggaatgtttcgtgagagatgcagaattgtaatggggaagtccgaaactttgggagaaactggatagacgttctcaaagagcgtgcagcaaggccttcggggtacatttatggtccctcgacatgcacgagtctcagaattgttacggaactcgcgccatggcgcgtactatttttattcattgtggtgtgatatgactaagcaacctgagctgttattattggcctaaatggcggtccggtgtcaacgtcaaccgtagtgtcacgccgccaagtacccaagttactgaattagcaaccaatgcggacggagtaccagcgtagaactgatccttgtgcgccttcctgaaacctggtcacgtatagctagtgcgttacaataggcgccctgcccttggaatgattctaagtggttgttcgataatgtacttaccgaaggagcgagcacgttaggtggatagttagtcgtggccggccacattaagtttcaacaggggccagcgcttatgcacctcaatcaccaaaacaaagtccatgaatcgaagaccgagatgagtgactagacggtcattgtctagctgggctctgatgtgagcaaggaatataagttgacttgagttcgccatggctcaattgtattcaaacaccaactgcctgtgccaagaaccgtatttttctgagctcattttccatcttagtttctcaaagatagcgcaactcttggtttatcatggatgccagcaatgttactttcgacccgcctaacatgtactcgaacaatccccaggagaagacgaggattatcaacttggtcattagccaagcacctgccggggctgcgagtgctatagtcgtgtaagttagtcgcatccctcattacaaccaagccgctgacgagagattttaggaacggctggcacaccagcagaagcgacaaacggcggcactgtaccgtcgattactacaacgccgctggtggctggatcagccgagagcacattatctgacttggctgggacaggagagggttcctggtacctgtagctttagattctctggggacggaagtttgttgaacagccgatgcctagaccgacctagcaggactagacagtccagtaagatccggattcagatatatgtatacagagagcagcaacctattttccctcttttttcttttctttttttttttggctcacggtagtattgataattcaaaaagtagcatgggtagagaataggtgaaaacgaaaaacgcccacaacgatggatataaaatattctgctcctcgactgataactagctgtgactgaaagcatagatgtgataagccagtgccccttgatcttacctttgtaataaagatcgagaaagcagtgtaatatggctactgtaactggtgattcttgattctctaggtagtcgtgctgtgataaccaacggcatggcggaggaatatcatcaaatcaatataattacttttcaaggagcgattgacagtgagctggggcatcatgcacgaagaagtatcgcttgaaaacaaaacgggggagtaatggactaggagctaatgtgtgattggttcccgactactccttgctctatcttggagaagctctaggctacgcgatccacttagaccagactacttggtcttctcaaactattaatgttccaaagaccgtggtgatatattagatcttcggaattcgtatccagagaaggaaaagtgactctttttgccattaaatctgaactaacttctctggcaatgtccggtgtgaccgttaggcggaaatcttgtcgatactggtttagctcaaattctgtcttgttcgtatctttcaatcactaggcggagggatatatattctaaatctaggactactatatgatttgcctaagtttgtggcaatgggctgctttgtggatgaacgatcgcatgttctgctactgattagtaaatctggaattgacttaaagtatagtgaatcatcggccaacacttaaacccttaaaacgactttcttgagctttctccttaagatttctgatttctagttcctaactatagcaatctttcttaaaatacattttattctctatactgttgtaattttgatacgggttaggattgtgtataaagataaagctattgtctaatgcccgaaaagaaaaaggagataagaaagtaggctgatgcgtatattgacagattagtgagtaaaggtaaatgaaacgatagaacactgcggcgactaaggatcagtaagaagtaaagggccgggcaaatgatatctaattgacgtttaggaagccctgcctaaatgctaacggattttgtgtggtaaatggctcccttgccgctctttcctacttagtgagctctcttttctaacatccgctttcctgtacccacgaaccctccctctttagttagctcgctgcctcctttactctcgtaacccagtcctttataccgttgacagtatcaataggcgagttcttcctctctagtaggaataataaaaccttagtaggactgaaaacttggtctggtaccttggaagcaaagttctcggcaagcctatcgattatctcatcgccgaatcgttcttcaggttgcttgaagtccagcgtccgcttgaagactatgtgaaaaagctgagtagaagtggtttcatcggtaagcttgaaatgcaccttcttgtccgtgcggctaggccgaatgagtgcttcgtctaaatgttcgatgtgatttgttgttatgataagaacccgaccctcttaggataagataccattacgaatattaagaaggctagatagggtgactctagtactttgcttgttctcttagtctatatcagtgttttccctgcgccctataccagcagcatctacatcttctaggagaacgatacagtgaggcggaagcttagtaaatagtgccattaacttgctattagaaatgcctaacaattaaagcgtataaatatctagttcaaattcccctgctagtgagagactgaaactggattttcctataccaggaggaccatatagaagatagcctcgttagtaggggataccgcggtcggcgtactaccgctgtgtatctttattaaggaagtcctttatatcccctaaaaggtcatcctatacctgcttgtctataataactgttaagataggttggattggtctcaacctggttttcttctactccccttcgcggtgcttaaatacagtgatcttcttatcaatgttattaaggtatttcccttagtattctttaataagttctttaagaatattcgggtaaagactaatagaggaaatacgaatatcttctcggtagtccttgactgtatagtgaaggataagcaaatgtcccttatactagaaaggaaaagacctatcctatagagaaaaggttaaggctttttttcttccgcgaagttaggtagtcgctcgctatagagatctcacgcgagcgatcaaagtatgggcattatagacgaagggttggtaagctatccaatcgacgagcatatcgtacgcctcgttataatacgagatatgaatcgtcgaagctatagattgtcagacccttccaatcataacgggtggctcacaaactgaagtagtttctcactagctcctatatatagcggatagtatagcgagtgaaaagggcaaaagctcccagggtacagaatattcgagtgtagctatctaggttaccagtaagcagctactatatggaggtagagaccatactgagactggggaagaggatatctataagagacatctagcgagggctattgattagataaaaagaaccttcgttaatagtgcccatttcacatgagtctcgaagaatactggtgattagataatcaaatgtggaaggcaataagtagagaggtgttttagaggctggctactgcgaatataattgcttagggttccaagctcccttttattatttatatccaagatattagacttttgtctctgggcactgggctacctcactggttctttgtattagatactagttctataaactcggcgtttagctcaaggtaaatgtgctgctgtatgatgtatattgtccagctaatttcgagtgatataggagaagtctgaataatttaataattgttttatttaaagctataacggataaaggtctgtataagagggaaacatatgtaaacctatataggcttaggaaggaatatctatattatta

SEQ ID NO: 132 - DNA, 4874 bp, Penicillium roqueforti; identical to SEQ ID NO: 36

SEQ ID NO: 133 - DNA, 4856 bp, Penicillium roqueforti; identical to SEQ ID NO: 85

SEQ ID NO: 134 - DNA, 4627 bp, Penicillium roqueforti; identical to SEQ ID NO: 38

SEQ ID NO: 135 - DNA, 4406 bp, Penicillium roqueforti; identical to SEQ ID NO: 87

SEQ ID NO: 136 - DNA, 4065 bp, Penicillium roqueforti; identical to SEQ ID NO: 40

SEQ ID NO: 137 - DNA, 3774 bp, Penicillium roqueforti; identical to SEQ ID NO: 41

SEQ ID NO: 138 - DNA, 3164 bp, Penicillium roqueforti; identical to SEQ ID NO: 42

SEQ ID NO: 139 - DNA, 2933 bp, Penicillium roqueforti; identical to SEQ ID NO: 43

SEQ ID NO: 140 - DNA, 2649 bp, Penicillium roqueforti; identical to SEQ ID NO: 44

SEQ ID NO: 141 - DNA, 2630 bp, Penicillium roqueforti; identical to SEQ ID NO: 45

SEQ ID NO: 142 - DNA, 2551 bp, Penicillium roqueforti; identical to SEQ ID NO: 46

SEQ ID NO: 143 - DNA, 2498 bp, Penicillium roqueforti; identical to SEQ ID NO: 47

SEQ ID NO: 144 - DNA, 2459 bp, Penicillium roqueforti; identical to SEQ ID NO: 48

SEQ ID NO: 145 - DNA, 2418 bp, Penicillium roqueforti; identical to SEQ ID NO: 97

SEQ ID NO: 146 - DNA, 2364 bp, Penicillium roqueforti; identical to SEQ ID NO: 50

SEQ ID NO: 147 - DNA, 2230 bp, Penicillium roqueforti; identical to SEQ ID NO: 51

SEQ ID NO: 148 - DNA, 2179 bp, Penicillium roqueforti; identical to SEQ ID NO: 52

SEQ ID NO: 149 - DNA, 2150 bp, Penicillium roqueforti; identical to SEQ ID NO: 53

SEQ ID NO: 150 - DNA, 2101 bp, Penicillium roqueforti; identical to SEQ ID NO: 54

SEQ ID NO: 151 - DNA, 8605834 bp, Penicillium roqueforti (residues 1-1,721,167 of 8,605,834)
  misc_feature (89143)..(89590): n is a, c, g, or t
  misc_feature (91422)..(91652): n is a, c, g, or t
  misc_feature (329880)..(330016): n is a, c, g, or t
  misc_feature (430767)..(431098): n is a, c, g, or t
  misc_feature (461650)..(461666): n is a, c, g, or t
  misc_feature (496409)..(496588): n is a, c, g, or t
  misc_feature (532012)..(532106): n is a, c, g, or t
  misc_feature (539762)..(539897): n is a, c, g, or t
  misc_feature (569546)..(569750): n is a, c, g, or t
  misc_feature (649063)..(649199): n is a, c, g, or t
  misc_feature (691124)..(691186): n is a, c, g, or t
  misc_feature (866509)..(866673): n is a, c, g, or t
  misc_feature (1032465)..(1091864): n is a, c, g, or t
  misc_feature (1092551)..(1092762): n is a, c, g, or t
  misc_feature (1210222)..(1210434): n is a, c, g, or t
  misc_feature (1240580)..(1246852): n is a, c, g, or t
  misc_feature (1247779)..(1253711): n is a, c, g, or t
  misc_feature (1258330)..(1372329): n is a, c, g, or t
  misc_feature (1374163)..(1374571): n is a, c, g, or t
  misc_feature (1457570)..(1457856): n is a, c, g, or t
  misc_feature (1505383)..(1505555): n is a, c, g, or t
  misc_feature (1513254)..(1513416): n is a, c, g, or t
  misc_feature (1624076)..(1624277): n is a, c, g, or t
  misc_feature (1669186)..(1669391): n is a, c, g, or t
  misc_feature (1761254)..(1761480): n is a, c, g, or t
  misc_feature (1817801)..(1926100): n is a, c, g, or t
  misc_feature (1933201)..(1933451): n is a, c, g, or t
  misc_feature (1964013)..(1964390): n is a, c, g, or t
  misc_feature (2150548)..(2150646): n is a, c, g, or t
  misc_feature (2196778)..(2196986): n is a, c, g, or t
  misc_feature (2250772)..(2250828): n is a, c, g, or t
  misc_feature (2391584)..(2391875): n is a, c, g, or t
  misc_feature (2493614)..(2493845): n is a, c, g, or t
  misc_feature (2532220)..(2532497): n is a, c, g, or t
  misc_feature (2536366)..(2536607): n is a, c, g, or t
  misc_feature (2786762)..(2787018): n is a, c, g, or t
  misc_feature (2859720)..(2860011): n is a, c, g, or t
  misc_feature (2874131)..(2875235): n is a, c, g, or t
  misc_feature (2881752)..(2882057): n is a, c, g, or t
  misc_feature (2897306)..(2897484): n is a, c, g, or t
  misc_feature (3050874)..(3051598): n is a, c, g, or t
  misc_feature (3057389)..(3057640): n is a, c, g, or t
  misc_feature (3069739)..(3070114): n is a, c, g, or t
  misc_feature (3075970)..(3076344): n is a, c, g, or t
  misc_feature (3305361)..(3305458): n is a, c, g, or t
  misc_feature (3318647)..(3318971): n is a, c, g, or t
  misc_feature (3502937)..(3503051): n is a, c, g, or t
  misc_feature (3538222)..(3538805): n is a, c, g, or t
  misc_feature (3783649)..(3783863): n is a, c, g, or t
  misc_feature (3992502)..(3992620): n is a, c, g, or t
  misc_feature (4005402)..(4005665): n is a, c, g, or t
  misc_feature (4027592)..(4027792): n is a, c, g, or t
  misc_feature (4058717)..(4058863): n is a, c, g, or t
  misc_feature (4267467)..(4267504): n is a, c, g, or t
  misc_feature (4352970)..(4353432): n is a, c, g, or t
  misc_feature (4361969)..(4362121): n is a, c, g, or t
  misc_feature (4393887)..(4394120): n is a, c, g, or t
  misc_feature (4451619)..(4451756): n is a, c, g, or t
  misc_feature (4461648)..(4461894): n is a, c, g, or t
  misc_feature (4481354)..(4481472): n is a, c, g, or t
  misc_feature (4534019)..(4534156): n is a, c, g, or t
  misc_feature (4590279)..(4590507): n is a, c, g, or t
  misc_feature (4669101)..(4669433): n is a, c, g, or t
  misc_feature (4737275)..(4737369): n is a, c, g, or t
  misc_feature (4766897)..(4767094): n is a, c, g, or t
  misc_feature (4834677)..(4834984): n is a, c, g, or t
  misc_feature (4927667)..(4928240): n is a, c, g, or t
  misc_feature (4945248)..(4945398): n is a, c, g, or t
  misc_feature (5082668)..(5082816): n is a, c, g, or t
  misc_feature (5112709)..(5113430): n is a, c, g, or t
  misc_feature (5314787)..(5314980): n is a, c, g, or t
  misc_feature (5372720)..(5373147): n is a, c, g, or t
  misc_feature (5459101)..(5459212): n is a, c, g, or t
  misc_feature (5480412)..(5480585): n is a, c, g, or t
  misc_feature (5535554)..(5535568): n is a, c, g, or t
  misc_feature (5567702)..(5567841): n is a, c, g, or t
  misc_feature (5598930)..(5599143): n is a, c, g, or t
  misc_feature (5726966)..(5727044): n is a, c, g, or t
  misc_feature (5743477)..(5743945): n is a, c, g, or t
  misc_feature (5807639)..(5807725): n is a, c, g, or t
  misc_feature (5919971)..(5920649): n is a, c, g, or t
  misc_feature (5921963)..(5922269): n is a, c, g, or t
  misc_feature (5942845)..(5943124): n is a, c, g, or t
  misc_feature (6011310)..(6011605): n is a, c, g, or t
  misc_feature (6325131)..(6325449): n is a, c, g, or t
  misc_feature (6397541)..(6397652): n is a, c, g, or t
  misc_feature (6604798)..(6604968): n is a, c, g, or t
  misc_feature (6843737)..(6849488): n is a, c, g, or t
  misc_feature (6859843)..(6860483): n is a, c, g, or t
  misc_feature (6915200)..(6915987): n is a, c, g, or t
  misc_feature (6919291)..(6924161): n is a, c, g, or t
  misc_feature (6950610)..(6950746): n is a, c, g, or t
  misc_feature (7010146)..(7010383): n is a, c, g, or t
  misc_feature (7088736)..(7088959): n is a, c, g, or t
  misc_feature (7281029)..(7281208): n is a, c, g, or t
  misc_feature (7435388)..(7435513): n is a, c, g, or t
  misc_feature (7580067)..(7580387): n is a, c, g, or t
  misc_feature (7598064)..(7598213): n is a, c, g, or t
  misc_feature (7639278)..(7639394): n is a, c, g, or t
  misc_feature (7648488)..(7648695): n is a, c, g, or t
  misc_feature (8007457)..(8007643): n is a, c, g, or t
  misc_feature (8053200)..(8053665): n is a, c, g, or t
  misc_feature (8129339)..(8129754): n is a, c, g, or t
  misc_feature (8134049)..(8134237): n is a, c, g, or t
  misc_feature (8188324)..(8188473): n is a, c, g, or t
  misc_feature (8240007)..(8240478): n is a, c, g, or t
  misc_feature (8245915)..(8246026): n is a, c, g, or t
  misc_feature (8305192)..(8305782): n is a, c, g, or t
  misc_feature (8314148)..(8318265): n is a, c, g, or t
  misc_feature (8345463)..(8345564): n is a, c, g, or t
  misc_feature (8407840)..(8408046): n is a, c, g, or t
  misc_feature (8424732)..(8424857): n is a, c, g, or t
  misc_feature (8481626)..(8481849): n is a, c, g, or t
  misc_feature (8597147)..(8597393): n is a, c, g, or t
gaccggacgcggtgccgccgctgcctttcgggcccgtcctacgataatcattatagggggatttcttacgtatgggttcggatgggtttggatttacaggactatgaggtataggaatgggctgattccactcttcacaattagcatctatctatatactctgggagagctcccgctcggcgttgggcttcgagttcttgcttaagttggatgaaatgcctgcatagtcatacgcaactagttagactataacaggttaattgacctttgattcatcgattgataaggctctgtgttttatgcttcttcgaagaacgtggatatataattgttgtattttctcaagaccaacaatattatctttttcggcggaaggcattgcgcagacttctgggcttcccttccgatcccatactgattctttgccagaatgtatacatttcgtgaagactgcattctacaggatattaatgctttttctgtaatgtagaaaatacctggaaatggttttcatacaggatttctgacagcagggcatttaaagaagtgtgaattgggcctttacagctatattatttgtaggcgtttacataaagaaatatatttgcgacagctgtcattcgacaatatatgcgaccgatgttagtagcgtcagtcacaagaaataactctgtaggcaagggacgcggcagaagaagtttcagctagcgcaacacaggcaatatatgtggatattgtacgatgaccaatcacctggaagcagatttcaataagatacaagatgagatgaagaaagctcagttcaactcgagagtaatagatgttttccactcaggactcgcatccagtaacagccatgcagccagcaagcaagacctcaaagaatcgcactggcaagaagagcagcaaagctgccaaagaggccgcctaatcatctaacaacgttgctaacctgttcacataaactctccacacagtacccattctcagtcccaacctctggacataaggaattggatatgcggcataggtttagatgactatatggtttgctctgatcagctttcatcccaggcacggtggcaaaatcacaagattaccatcaagacagctttgcagaccgtacaaatcgacggcttacggtctgagaggaagcaagatgcagcttgacgaaggcagtaaggccggggcccggggtgtcatcctggaaaacaccatgtacctaacctctcaatgcaaattagctaaaaggccatcatcatcaatcccgcattgttaaagtattacaagtatgaggtataatattgcatgtgaccagcgtttgtgtaaggaaatgttgcaagtgtatggttacagtcttttaaatacgtgaggggaaactcgcttgtgttgagagggttccaagaatattgaaacgcacaaacgcacaacgacaagtgagcagatatttcatccagtgcaatcgggccgaatcccaaacatgctgtgatacggagagcatcgcatggtttctattaggttgggtaagccaacgactaagtacgatctagtacaggagttgttgggagtacccaagtgtgcagaatggtccgtaccattggcaccagccccaagacctttggaaagccaagcatggatttcgacagatcataagttttaacaggcgttgaactgttgatgcgcgatggtagatggtaattaattcgctctgtatatttctaactactcccatataccctgatccatcctgatccatcctcattcatcctcggaaaatctactgtttttaatcaacctggggagcaggacttgcccatcggaggctctgcgcaagtactctcccaacaacacactcattcctgcttgttcggcagcactcacccactcgtcgagtgaaacgacctgaaactgttggcccgagctcgattccatcaagggcatgatttcatcacgtccaatcttcgtctcgccagattcatacagatacgtcacagcctccgtagtggcgataccagattggtaaacggcctcgaggagttggcgtgcggccgactgtacggaaaccagatcgaagactcctgaccatgagctcgagtctggcactttctgggtttctttggtgaaccgcatgacattacccataagatcaagttccggcgcatcggtaccggtgatgctcgatgggcggtgtatccataccggcagaccaaatcgacggttgacgtgctcgagatatatttcgctcacccacttggcagcgatgtatccatctgttggtcgagatggaggaggatatgacgatacagacatctcgccgaagctttcttgaccagtaagccgtgcaacaccagccgacgaaacaaaatgtaatggaatacgccggggcaatgcaagtttgacgatttctttcgtcgatgccacattgatcagcttgagagtctgatatgttttcatgaacgacacatccgcgccattgtgaataacgatgtctgcacaggagaatatggatttgatctcagattcagatagtcctagttgaggagcccccagatcaccgtaatgcaagtgaactttcgggtgggaaaatagttcagataaacccgatgatcgttttctgacagcaagacaatgaacggacaaaacgttttcatcatgtataagacctcggaggatttctttgccaaggaaacccgttgcgccagtgagtaccactgtcttgacccccgaggcgataatatgggtgctctcataattcagaggtggagtgaggtccgttgcgacttcaatctccgcatcccaattcacatccggctcgagtgcggggcgagatatatcttgaattctggccgccattccacgtagactgctggcttcgaaaagttgatacaatgccatagatgtaccgaacttctcctggattagaacttgcaggttgacaagagcgagggagcttccaccaacgtggaaaaagtcagattctgaatcaatcgagtgaaagctgctgagttcgcgtggtagtgcctgtcgccagagctgacgcaatgattgttcaaatgccgtgagggtgctgttgtccggcggctgggatgaaataaatggaatggaaagtgcgctgactgcgacgcgatcagtcttgcccgaggtattttggggaatgctttcaactggaatgatagcagcaggtttcatatgaggtggcaatggcagctcctgggaaaggcgggcgagaaattgaagtatattttcagattcgtgtgtggcagccattataacaaaggcaacaagaaattgatcgccctcagattggtttgcatctaaacgaaccgataccacagcttgtgtgatagctccagctgaagaactgacgatcgccgtctcgatctcttcgatattgatgcgaattcccctcaatttgatttggttatccccgtccatgcgcccgaggagaataagaccaccatcgcgattgagctttccgcggtctccagtgcggtgaattgttgtccagtctttctcttggaaaaatttgcttgcgtaccgatcacttgaaaatcgttcggctgttttggtgccatcaagatagccctgggcaactcctgcaccaccaacgaccacttccccaggaattccgatgggaacagggttcaaggtttggtcgacaatgtaaacggagtagtttggtagtgtataaagagcttgcgcaggggatgttgatgtggaacccagcaggtcgtacggaacttcactggctgagcatgcaacactgatttccgccggcccataggcatttatcagtttgaggtctggccgatgaagattcttgatctctttgatcaacccacttggcatgaattcaccaccacataccgcggttgataagcgagagttactcagatgggagcgaccataacgcaaccaagcgagatattcggtgggggtcgcaagggtgcacgtcacattctctgatgcgatgagtcgcgtgagagcaatgggatcccctcgtgtgagatcagatgcaatcacaagggtcgccgcagagcatagagagaccatgatctgccataaagacgcatcccaagcatatgatgattgatgcaggatggtctcattcccctgcttaagttcccagacgacactggatgactgaacgtggtgaacatatgctgaatgcgcaatcataattccctttgggacaccggttgatccgctggtatacatgatcaccgctgtctgacttgggacagccatgtttcggatggggcgtgcagtagaggcgtttaggctacatacgtcgataggttttgccgtcgtatgcagaagcgtatagtcaggcatagattttgtatcaaccaataccatcggtgcttgtgtttctttcatgatcattgcgagtctgttcatccccacctttgtgtccaatggaatgtaaacaccaccgacacgcaaaatggccatgagagaacatatccagtctgcacttggagactgtaaaataccaacacgggtgcctgagccaacttcgttgcgtaggagttcgttggcaataacatcgatccgacgctggacttcactataggtcaaggagtttccatcgtggttcctcaatgcgacacggtctggataacgcgaggcaacctcatccaggcgatggacgatagtcacaggccattcatctcgcagctcgggtcctgcataataccatatttagcaaatgacctacaactagcaagggatgattgacttgcctcggcccgcaatcactgcctcttgaatgtcatctttcgaatgtaatttcggccaggtcacccgggttgctggattctggaggaaagaacgaaggatattgacataggaactgaccaggatttctgcatgctccattccatacaagctagtctgggcagacaggtgaattagcgtctcgccggcaccgacattgccaacatctagaccgagatcgaaagaagtttcgccgccgcccaaaagtgcgccatcggctacacaaccacagaagcttcgtgattgctcgaccttgggtcgatagttgaagagggtttggcacagaggattatgagatgcggatcgtggaacgttgagttctgtcaagataacatcaaacggcacacgcgagtgggaaaacgcaccctgtgtgatgttcctgacctctttgagagattctccgaaagattggcctggctgttgagagaacctcacaggaaggaggttcaagaaaagtcccacgctccgtagtatgtcggcatccgtacggtttccatctccgaggccgatgcaaacttccttcacatcaaaaaaccgcagaagaagggtcttccagactgccaaatggaagtggaagggtgttgatttgaacatccggcaacaccggtcaattgaatccgataaactgacatcgagacgaatatgtgcagtatgggaacgaaattgagcaaccttagggcgcatgggttgtagagcaaatggaagaaggggaattgtgggtggaatctctgtatactgggctcgccagtaagcgatatctccagcccaggtgccctcttcgtattcacgaagctgccgcatagtaaagtctggatattgaagtccatcttcagaaaggggttggccttgatatgccttttccacgtctgaccaaaatacttcgaagctaataccatccatgttgatgtgatgaaagccgaagattatccagtgcttttctaggtcaagcgaaagcagctgaacacgcatgacctcgccatcagagaggttgaacacgtgcgccttcatctgtttctcggcctcttcaacttctgccttgtcggagattgcaacatgctccaactgtaacgaagatttcgtccaaacgccttggatatggttccgttcattgtcagtgaaaaaaaatgtacgcagggcttcgtggtgttgtcctgtggcttttacggcatttgcaaattcttgaattctcaggcgaccagacaactcaaatgtcggtgtaatattaaatgcagttttgtcctcaacaagatgctctaggaaccagaaacgcgactgaccataggacatcggcagagtcctttggatttcacgttttgggggtcccactttgctgctgtcagtaaaaacggatgatgaagtgtcatcattgtcttcggaattcgagtctccggtaactaacgacgtcgccgagctgccactgtacgcattcgttgcatcaggaagtgcaaaatttgactccatagaccttgctctggtatctggaactattttatccacgggcaaagtgggggaaggtgttgaagagttaggctggtgcgcctgtgactttacagcctgttctgccatcacattggggatcaaagattctggcagaacttctgcagcagtggccaaaagctcacgaattgacgccgcgttaaagattttcagcaccggcatatccacccccagctccttgaggaaccacgatcgaaggtcaacagcgaccaatgaatcgacaccaagctcatccggactcatgtccaacataggcttgttgggatcagcctgaagggcggactggagcttcaaaacaaagctatctaaagacagctgttagtttcagctgggtatctaacttgggatgcctgtaccttgcaagatctcgatgacttcctggtttgaagttgcctcgaataagcgtgtttttatcaacacgccagatttccctttcttgtctgtcaccacaagtttgctagacttgtagaccagatgttgaaaaattgggttagaaacccaactcttcgactcatcatcgtcaattctgagtccacagcataactcagcgctcccgacacgctccctacaagaaagtacaccttcggcaaacacctcatggaagtcttgttcagacatccatgaatgcccgactcggtaaaggtatgattgctggcccatgttcagctctcgtgtaacgtagccgttaccgacaatcgcgccgatgttgatcgcatgtgctgccaatccacggtttcggcgttgggctgccagactcgccataaacatattcgcggcattataggcaacctggccagggtttcccgtcatcgcagccatcgacgagaagaaaaccataaattccaacgtgtcctctgggaacaattcgtccagtaatatactaccttcaactttaggacggagaaccttctcaaggcgagggagatctaaatcaatgaacattgtgtcctggagcaccatcgcaccttgtgcaacacccgcgataggaggcatggtttcgctgatgttacgatgggttgcttgaacagattcccgattcgttatgtcactgcatgtgttagccaggcgtgagtgattggaaccaaacaagagcttacttggagaatactcggacagtgcatccattcgcagccattctctgcagccattggtcatcgatatttgggtttcgacttgatagcgcgatgtatcgtgccccctgtccgatcatccactggcaaagcgacaaaccgagcccgcctgttagtccaactagccagtaagttttgtcctttgagaatttgacagctttggtagcagggcgaacttggacagcaagctgcgattgaccccatgcaattaaagactggcccgcaagcggagattgtgcgcgaatcaggtcctcaagtcctagaggaacaaacttgtgcatattaactggcatcaggtcgtattgtgctctcgcccaggtattctgcagctgcatagccaattggcctgtatctgaggtgtactgagattgagagatgtttgcagtcaaagtgctctcgctctcaaaatgacagtctgtccgcaagcatgtcctcaggagagtagtcacattagagctgccactcatattgacaaggcgtgaaatattgccatgtagcttacttaatacttcacgccgggtggagtttgggtggattcggatccatggccatgagcaatgtccttcctttgttgtcaaaaggacaagttgcacacccttttctgctgcatatttcgtaaggactggtgctagcgagaagccagggtctaacacggccaatatcgttcctggttgaagctgttggagcatagagagagcaaggaaatgggaatagagggtgagtatcgatcgaattcctagctcttcggaatctccacatcgcaccgtcaggccatgtggcacacgaacttgagagtccagagtatgcgacagagcgaccacacgctcaccattccacttattcttcccaaccagcaagaaataattgtccgttggagtgatgcggacggcacggaggaaagagtgagccacatcaatatgcacatcatccgggaaagagggcgagtcttgaaggtccttttcttcaatttgatatccaatttcagttggtcggatggtcaccacggatttcttacgttcaacctctttaataataagacgccttgaggaattgtatcgatcgttccgaccagagttcaggcggaatcgaggaactttgaaattcccattctctagcagcagctccctctcgttggaccacaacatcccatcaagctggccactctgatcccaaatttcggcggcttccaaatggagcagctttgtagcgataatattggaatcagcgtcataaagcgaacggagttttaggaaatggatatggaggtgagtcatctccatggccaatgtgcgttgaactcctgtgaacatgttgccatagggattctctccctgggcaccgtgtcccacccacagaacattcttgctttgtttgaagagctcttggaatgacctcagattattaggagacatgtgcctgagaacaggcccatccaattcaatcagactgatcactgaccccattacgggaagatttgccgagacgaggtcatctaaagagccagctgtgtagatattgctgtagtggggacggaccgcagtcttcatatcggctacgatatcagcagtcaaggatgttttccctccgatgattgtcaacgagttcacacctagtggtgtatgattcgctgctaggggatcacgaagaaaattgacgcggtgatcgacagcttgggtaatcatgacggagaatggcagaggcgaggttctggaagatgacaacaatgcttcgaaaccagaaaatcctgttttttgcatcaatccttcccatttctcctccgatatacaaggggataaggttcgtccctccttgtagcctaaccaccagcctggtaggccaccaaaaatcaacccgaagcgcatgacatccgagtcggtgagttcgagcataaccaggtacccaccaggctttagtagccgtcgaacatttgtgagggttgcctcaagatttctggtggcatacagggctagaggagcaatgacaaggtcaaaacaaccctcttcatagtcttgttccccgatgtctttctcgatgtccaacaacttgaatgccattctagattggtaatccgagaatctttcacgcgcgttatcgaactgtgagtccaaaatatcggtatatgtgtatgatgtaaatgaggagcccattgcacgaaggactcgttccgaagtagcgccggcgccagctcctgtaataaattagtattgcacacaatttcaaatctgtgtggactaaccaatctccaaaacattgacatgggggtatctatggccgatctgacgagccgtctgtgcgatggtttccaagtatgcgtctattccaagtgttttggcgtaaaattccgctagcatattgtcgcgcatcaggatttcaagtaaattctgatctccgcgaatgacagcaggaaggttctccccaactgaacacagtgctttgatgtcgatacagtcggaatgactatgtagatcagtcagtgtgattcaatttcagtttgttaggtaaacaagagttcaagttctcaccgattcagaattggagcaacatcgtccatggtgtcattggcccattccgcctttgcgaatttatgttttccattagcaacagaggttgtacaatgctccacatatgagagaaaacgtgtatggtcccaagttgcatttgcatgatcgaagtcctggagcgaattttcaaggtttttcaagtagaaatgtgccacgcgctcgagatccacgcctagggaaccctcttggggaagcatgccttcagctttcttaagttgtcgcaaggtgggtctatcaacatcccataccacttccgtgaaaaagggaacatcatttgatgatgtcaatggactcaagggtgtggtatgaagcccttccagttgaaccaaagtatgtctcccgtctgctgaaaatatatcaacatcgccagagagttcagcaaagcgggcatccgtgaccgcagaataaaacggcaaatctgtaccacaagcaccaagagcgacacaggcggttggattgaggcgaagcctgtcaattcgagtgggaaggtaaagggtgcgcaagcgtccatcacctggaaaggaataagcaagcatgatggactgaatagctccgtcaagagaggctgggtgaatgatcaacggtctttcagttttggaatccactgggacagcaatcaaacccgatgcctcgtccatttttctgcgcaagttgaaaagggcctggaaggggccggtatagccaaacccaagctctgaaactgaattgtagaatcggtctgcttccagatccaggaatgagccttgcgggtgggcgtgtggtgggaggatatcgtgcctggggtcacccaaaataatttgtatggcggcagatgcgtgaagagacatgttggatgaccccttattagcgtcagaatgacaggcaaaggacgcagacacgcaatcggcctggacttggtcgatggaaagtctgaaaatcgtttccactcccccgttctcttccaataccaatgcctgtccgatgaccacatcatggaagtcgatcagttgcacagaacccaggccatacttttgaatgatacactcaaccgccgccgatatataaccagctgcagggaataccatttggccttggacctggtgatgtgccagccatggaacctccctagggtgaagatagttgcgccagcgtaactcattgtctgtcccatcggggcatttgacacccagtagggggtggaatggttccttttcagtgcgtattgcggtagatgatcgagattcgtgccaataaacccgatcatggtcccacgaatacgatggaaggccttttatgagctctggagatcgagtgttttgattttgcattgctttcatctcaaaccctgcgaagtccacgacaccctcacccaaggcaatccatagggcgcctagggcggatgagaaagcctcgctgtccttttttccacgatttagggttccggtgtaaggcaatgtctggccagacacttcttggatcgtctgcattgaaggtcctttcagtgctgggtgaggaccaatctccaaagccatgtcgaatggcccagctgcaccaacggcataagtgacagcctgggagaatagtacgggcttgaccatgttattgctccagtacgtgtcggcaagattctcatccacgctgtcaatgttttccccatacacactagaaatccaggtagcactgccactcggtggacgctgaactgttatgccgcacgtgcggatcgctgcgatataaggagctgcgcaggaaagcatgtgatgtgagtgataagctttgtccactttcaacaagcgagcaaattttttctcatcttcaagaatttctctagcctcatcgatcgcatcggcgtccccggaaagtgtgacgctggcggaggagttgctagctgccacgcaaattctgttctcgagggacggcatctcgcaaagctcctttgcatcctcaaatgatgttcccgcggccatcattgcccctatctgtcctccctgggaagttgtatactgaagagaccatccgcggtaataggcaatgcggatagcatcctcttcgttgagataccccgcggcatacgctgcggcaatctccccagacgaatggccaacgacagcagtaggtttcacattggctgctcggagaagctgaaccaacgcaatttgaatcgcggtacagagaggttgcgaaaacgccgcctccccaatacgggatgaaaacttatctttcacaagctcccccctcagcgaccaaacagggcgatgctcagtgggtaaatcccgcaaagaccgatcgagtcgggcgatacaatcactgaccattggcgagctttcgagcagttcagcacccatccttgcccactgtgctccttggcccgtaaacacccaaaggagtttcggttcgaggatacttcctgtttgcgtgcttggtgttattgccaaggacagtactgcttcatccagccctgcagcaagctctcctaggcttgatgcagacaccgacagacgtactggcagagtggaacgtcggcagttcaatgtccatgacaaatcacggatattgacatccgaattatttcgcaaatacgccgagtatgctgcaatgttggtgagaagcgacttttcggaggaggcagagaaattgaatggtaacactgctccggagctgtcatgtgcagcgttctgaccacaggcaagcaggcgcgtatcgaattcttccaaaattgcatgcgcatttgcgccgccaaagccaaagctgttgacactagcacgacgaggggtgttctctgaaagctgcggccattctttcgcaacttgaaggatttcaaggtcgttgtagaagggaagtaccgtggaactcaactcattgagcaataggtttggtgggatgacagcatgttgtaaagcaagtgatgccttgaggaccgctgctaatccagccgtgccctcagtgtgcccgatcactgttttgattgacccaacatacaaggggtgctctcggttactatcgcgctgatacttggctgcttgtccaaagaatgcagtactgatggcctccgcctcgactgggtcacctgcaggagttcctggttcggtcagcaaagccctacaacactcggtttcaccttcatttcagttataacttaccggtaccgtgagcttcgaaatattgcggccggtcggtggggttggaaagatctagtccagctcgggcatacgtagtccgaataaggtctgcttgagccatagggttgggcatcgtgattcccttggtacgaccgtcttgattggcacctgtctctcgaacgatgcattcgatgtgatctccattcgccaatgctgcacttaatggtttgagtattatggcagcaattccgtcaccgcgtgcgtatccatctgcatctttatcccacatgcgcgagcggcccgtcggggaaagcatcttcagcttgctctctgcgatatattgctccggtccaagcagaaggttggttcctgctgctaccgcaacatcagtctcgccacttcgcaggctctgtacggcctggtgaagggcaatcagactagaagaacatgccgtgtcgatggtcatggaaggtccccgccagtcgaaaaagtaggacactcgattggatagaatgcttcgagcagttcccgacgcaaaataagttgggaagttctgcacatcccgacccaacatatccgcatagtcattggtcatcaaaccaacatatacgccggtgttagacccttgtagcttttccatgggaatgccagatgtttcgagtccctcgtaaacagtctcaagcaagagcctttgttgcggatcaatcgagtttgcttccactggcttggttccaaaaaattgggcgtcaaacagtcgatgatcgtcggacaacaaataggaatgtcgaacattcgttgtgccatggtgaaggccatcggggtggtaaaatgctttggtgctaaaacggctttctggaatctcgctaaggacatctcgtggtgatctgagcaagtcccaaagtttcgagggtgttgttgcatcaccaggaaagcggcaggcacttcccacgatggcaatcggttctccggtgtgctgaagaccacctgtcattgtgtagctcgggtttcactgactctgcacaggctggtacgatcaatgtgtgactccgcgtatttctatgaagggtctataggatatcaatcatggacaatcgggacaagattttctttgcaacattcacactctagttagcagcgatggggagcggtacatatcattgtgccgatgctcgccttggttgtcagattaggatagttcggacatccaatctcgcatcagcttgtcattgttttcagctggttccgactccgaggcctgtctccggggttgtgatgtgaaacgagacaaatcatgatgtaggtatgggatccaccgggtttttgccatgtgtgcagataaacttcctgtgttttctcacttcatgttattctagaaatctagaaatactaggcttccaggggtttgaagtccggctagtttgaaatctcaagaccgagtccgagtccgagggtcattgccctgttgcatttgcatgttcgagatctcagcaagaccatcaaaccatcgatgagtcgccagcatggcgtgcagggatcgtaaatatttgtctcatggccaatggagtctactatattgcgatattgcacaacaaggatccaaggagaatatgcgcccgactactctttttcctaagtaattagcaatcggtaggttcagcatcatgcttcgactccgagatcaataacatacctagtccatgttctaatactagaacccctttttcccagatcaccactcttaggttcgcaaccacatttccatgtgccatggatcttggtcggtttgagtcttgacctcagcatattcgagtttcaactcctaatatccgatgatggctgcatattgtaatctgagcggtcagcacgtggaaaatggacgtgctctagacagtttgtgttgtctgcttccctatccctctctaggcaggaggtaaaaatattccccaccccgccctgtcttggtaatgctgcatgcagcagctaggatcaggataggcaggaggtgaaatgaaggctcgctggggacaaagcgcacggaagaggtggggaaatagaaggacccttggaaggtagttacctaagagaaggctgctgactcaggtatcaactgtggcctgaggcctctatttctttcacttatcggaatgaactgcccagatgggaataagacactctaatcacttgccaatagtatctttccattgcatacattggactgcagatagcgactgtactcaataaatataaacaaattcatcattctcccggtctgtcagatcctgaaacgcattgtccccaacttgcacagtctcaagtccagcttcctcgatgttatcctgcatttcgtgatagtcattctgcatcgaaacatcaactatttctgctcttttgccattttgtacacgtcgacgggcttgttgtttgttgaggaaccatagattagcccactggataagaacaacagcggccaaggtgctgaagattccgagacatgcgcgcaggcctgggtgataggctggcttatctttctcgttgaatagcaacgggccaatgatatttcctgccgagcttgctgcattgtacaaactcatgataacggacttcttggtggtgcctgccgtgttgccgatgatccatgtcacaatcaatggattgccgccaaataagaatgcgagtagatagtagccagcaagtaactggccctgtacagagttggtccgagccaccgcatacaaaattgcaagcccggctatcacgggcagcatgaacgctgcgatgatagcgctcttcaaacgagcggtttgggcaagataacttgctagcagaatgatgaggaattgcagcgcgccaaatggcatggtcaacagagtggtcctgtacttatcgtagccaaggccgctcaaaatcagtggaccgaagacgttgttcacgctagcgccaatgttgaggagcattgccattccaatccacagatatgttttgggctctaagcacgcctcgaggacgtgattaaatttaaactcggtgtttcctgttccagtctggttggctcgaagtcgctccattccttgggctttctcttcctcggtgaggaaccgagcggtcgagatatcgttgtccaagcgccagtagacgattggggcagatgcgacagttatcaggccaacaacaagaaatatgctaaaatcaagtcagaatataccactctcgggggttgattggtttgatttcctacatctgccatgatttcagcacgtctgactctatttgtgccagcccgtacgatagagcagctgcaacgacggttgctaggccatttgtgctataccatgcagcgatccgtatcggttgctctgcacgacggtaccattggctcgtgataacaccaaagagagggagacacccggcctcaaataggccgagaaaaaaccgagcggccatcaaggagccgaagttgtggcatgcagccatgcatgtctgcgcaattccccacccgaggcatagcactggcataagaattttgtgaggaaccttgacaatcaggtatgaagaaaagggctgccaggcaagttgtgcaatgggtccgatggagccgacaagcgaatattcgttgccgacaaggcctgtgtctttctgtaaaccgaacgttgcaccgtatcccaaaactgtcttatcgaggatctgcaagaagtagacccaggcaagcacaacaagaatagtccgatcggtcttgcgacagatgcgcttgctgtcctcttcggtcaaggagacacgtacaataccactgttatcgatgagtttgtcccccttctgctgctctgcggcttcattgtgaacaacatctggtttggacatggtgggttcttccatcgtaggagaatatctataccatgatcgtccctatcaaggcatatatatacatatgtacggagtagggtcagttgccgcgcctcacgtcattcggtgaattctaggtgtttccccatgtttccccccacgtctccgcatgcccccacgaaagtctaacgcgcgcagtccacattcgccaagatatttagcgaaccaacgttgccggagattgattagagtttcctgtgtcttccaatcgattagaatatccttgccactttccatggacaacgcattgtcaagcttcggggtggagatccctattcggacatcccgtgattaccgagcctaaccgaaactcggggggtgggggtgagcccttgccgagggggacaggaatgcaggaatgaggccataaattacctctgcactttcttatttgacagtcggctaatgggagaattgtcggtgactgcgctctattgccgttgtatattgttgcaacgggtaaagaggtaagatgccgaagactgactgaaatatgtatctgagaaataattggcgcctgatgagttatttttccctctcgccggcagacaatatctcaagatattgaacaaatatgctttggattatcgctcccagaaagggaaaatcaaacgccgattactatctccacgcctagtttagagccctggaaagagcgaattcaagaaaaagacttccccaaatggacgacgcatgtcggcatatctacaaagcccgaaattcatacatttggcgcaaattatgcaacataccgcgaagcatagccacctcacctcccatttaacgtcgaaaaaatgttgatcacgttgatacatgccggattgcgagagtaccgcgccctaatctttgagtgaatcatgaccccaatttttgagcgatcggtaactcttgctattcgtgtcgtacttggctcgctcctcttgcgctaaatgacgcttgcagtaggataccacgcgacgcatgtggtcaatgtcttgatcgctgtagtcggacgggttctcgttgggattgtgctcgaggatccgcacaatccttcggccactatcactatgattaacgctcgtttcttttttccaaccactggaactctgcaatcgagggcgaccaaagtaagaattactgacctttcgtggccaattgtttccccggaactgcccgcccaacccgatgtttgtgattgctcttgctcaagccaaccacgaagctcgattggggtcatgttcacgagatcgttgaattcactgctcagtttgtcaaaaaaatttgtttatcaaagctggcaatggaaagatacccaatcacggtgtctctgtccttcattgtttccactgatgaatattggaattttggttagatactacgagtgatggtaatcactattggcacagtggtgagtgattttgctaatttgaagttcagtttgacgtcatagcggcggaagcatgttgctatgtcacgatgacaaggctggttgtagatacggtggacacctggaatcatgaagcagaattgctaaattcttagacaaatcggacctgctttctaaattgaacgaaggagattttctcgcgagggcaagtaaagacaatgccattaccacggccagaacaatcgaccatgcagatgtgcgcaattaaataacaaagcattgctcctttggttggaattctgatcgctggccatctcatatcgacttagatgtgtccaagcccattaagaatggttggtctccatcgctttccttgtcttttctttttcctaaatctgacgattaaatttaaccaactatgcagtcagcgtcaatcatttgaataaaagatattctgaattaacccaccgaccaagcctgggaccattgctccactgggctttgatggttctcatccttttgaattgggcgaatttgttgttttatcttgtaataatgttgacggtaacattgccgcctcgggaagtgatcggctcccggattccagggtgagttagtcaccccgccgccctaagctgcccactgagcgaccctgagctgctcagtgagcaacctgatcgctcaccccggtgctctcccttcaccctccgtcttgccttctagctttcgcctgctccgatggtaaccgcactgcctaccggtgttcctgggagttctggtctggagatgacgtattcccacgtcgctacagtgacttgctgtcctcttcgaactttccatcggttgactcgatcccttcggcttgcatgagatattcagtaccacctcacctctacaccctctcatacgttctctcgctaacgctgccgacaccacccagcaaacgatccacaaaaattcaccgttgtcctcgttcctccatttactgtgccaatttgatcccaggaacaacattcgcaccagccttcgggcaacctctttttgtgtggtatacctaggtctcgaacaactcgccgcgccgtgtgacgcaagtcgacgacatcggctgacggatctagtttagtttcgggctagatatctgccactgtgaatgaattaagctagcattcctaggaaccctttcctataactgatccctcgcacctagaaatggctctgcgattggctgcagcgaatactggggccttgtcgatagatccagaatctatgccgattctgtcaacaattcgctgctctatctcacgggctgattgaaacgatgaatcgaaacaaataaatagtcccaactatccctcctttgcagcgtttgtttgaaatatcatcgaacgtgaattttactgcctcctgctttgattcccattcattcagaacctcttgaatctacctaccatggtaacgctgaaccatcaacgattttggcagccattaccaagagcttcagtgagacgctcttcaaccggctcagaaacccagactaccgatgtagtgaggcaatcggacgccccagaagaaagaaatgaagcagactacaccctggggtgtaatgtgccacaagaagaacgcagtacattgagtctcggtaagacatattttaaacaccctcctcccatgccccttggaattaatacggtctctccaatcctagaacccggcgagccccctcgagccaattcgcctgaactctatctcaatgatgcagcatcagccgctggaaattatcctgactaccccgaggaagtcgctctttatccttcctcccgagatactgcctccgtgactggcttagaaggccctggtacgacgagagtcttcgatgtctttgaggacgatggcaccagacaaagcgatggggggtattacagagattgtaatccaaacgaaaggaagcgagctttggaatattcaaaaacatcctctccgaaacgatgccggcaccggacttctacggtcacaaatgcgaacaagccgcgaggaagacgagcacataaaccaggagccggaaattcgccaagcgaaatcacagagggcgattccgcgggcaatcttgcaggcctaaggaatgcgatcggatatttgaagcgcgcttacagtgtagtcactgctgaggccaaattttctgacgacctcacgggtgcaggaattctcaaagagaatcttgcagtgcttcagcttgcaacaaaaacgctacaacacgcatacggcatcatcgcaacaagcaccacagcaatggaaaattcagtgcgagaggctacgactgtaaaaccacggccaggttttacccgcaggaagtggacccccgaagatgggcgtcgactcttgaggttgaaagactctcaaaagctgtcatggagtagtattcgcgattcgttccccgaaagaactatgaatgcactcaggagccaatactctcgggagacttccaagcatttggaagctttttcgagtaaggagagccaatcggtcagcgctggtcggcaaccaaagtacacatcaaagatccgaagaagccctaggctaggcaaacctcaccaggtcaaaagtatgaggagcgaagtcgagcaccaccgaaggtatccctcgcgtgcaaggaatcattgcggtgataatgcattgaagttggattccattgatccccgactccgtgacctcggtaatgcctaagtccgccccactgtatttttttctggtggtaagaccggcataggatgtttggacagcaatatatcttctgcaaatgcgaattacggtcaatgctacaatgtgattagagcagaaggttctgtttccggagttctttatgtagataccgagcctatattcaacgagttgagacttcttgcaccgattacatgatacggttttttggtgcagtagaagtccgtatagggacctgctagagcttacgtagtgtagagactggtatgatctcttcaatatgcacaacaaatataggtcaaaatcttctaccttccaaaattggcgctagagacttatacctacgaactgatcttggaaggcgattgactacaaagaattatgcagcaaacgaaatgtatatgcattgaaaggtgacattcgagctggccgtgaacctctcacgtgtttttattagcttccaataatagcagatatcgtcaactatctctaccgagatgtaacgcgcagaatgaaaggttgtttgcgatcctgggaacacttagcctcctgggagtgctaatagtcgctgtcagggatatactttaagcataaaggatgcatggagatgatctgcgggacccacattgtgcatatgggttcccctgaacgcgaggaagcctgtatctagagtcagctataattgttcaccatattggttattcatgacaagacacttccatctatacgtatacgagagaccctcgcagtcgctctcaggaacacagtccaagtctcccagaagctgatcaaatgcatccacgctttcacttcgtaagactccttgagttccgggttcttcctaacccaatttgaaataatgctcatgagaagcttatctgcggttatttaaaataatgcctctcatggtagaagtgtttcagaatatacatatcaagaatctatggagtaggttcatatttaggtttttattaatccttcagcagagacatgggcctgtgctccccttgaggactttgcccctgatatttaatggctagctcgtccatcttcatttgaatcggctcagggtgatttgactccttgttctgtgagcgtccaataaacttgaattaacgagtgaaaacaagaggagcagcttactatttgttctgtagatagaggccactctttggcgttcgaagtcaacgtgtatagttggcctgtcttcttcattcggagaacgaagtggatgtcggcatcacattctgtacaatactcgaaaatcttctttaatagtgtctccctccttctcagacttttttgatttccccttctggcatgagatgttttgaacttgctgttggcgatatttgtaggcaatgatatgtttaccaccggagagggttccatttgaattctatccgctggcatcggtcaggctgtaaatactttttgttacctaggatatgatttaatataaggtgcataatgtctctccggctcaactaacaacgacaatgacatttattagaattgatttgtgttgatagatggatcctgtggtaaagcaacttaagctgtcatgtcttcaacgcccatgacttccgacttgaccaagcaagtacccgttgaatttgaacttcatttagcaaaaatcacttaaacgagggccataaaaccatactattatcactttaagggtttatattagctcagattgaagataggaagtgacagaaaggcaaagatcgagccccatttgaggtcaaccatcacctgctctcatgttcggtagataacgttcaaatagcacttgtatgtacagtaccataaggacgtgtaaataatcttctagattgagctgatatccagggtcctgttctctatagagatatgactgcttgtatgtaatgccatgtgcctgtgctattgctatccatgtcaccatgtgtcctcttgggtagactctagaaaattggtctgaagagccacattagaatactcaggattaataatcacctattgctactagagcattctgcaaaaataccatcttggaaatcatgattgtagccccttcactgtgattcacaagtttaattccgctggtcttgccttgaatagattgcatgtcagaaaattattccgcagtgacagcagattctattaaatgacagttattcaagtggcaagccactatttgagatagataacgccaaacttgagtttctataacctctcaccagaggtaagcgaagtgggatggaatggtttgacgcgtcaaacttttagcacagcctaggctgcactgtattcagaatgtactggaaatccggtatcgattgtcatttgtgtatcgtgatttccactctcgtgcgcattactggcatagccacagcgctggtaagctcagccacaattatatagattacccccctcgtctgtaatggaaaaacccgtatcgctgtgttcgatacacaatttcggtaccaacttcagcctggttcataccatattgcaacgttgaacgtggccacactacacattacgattgcctctgaaaatggggtctaatttcgtagcaaaccactatgcctctggactgtactttggatgagacgttatgacctacgccaatgcctctgttgccgcccgcattttattttcatgtattctatccagagcgaaccgttcctagggatgcccatcagaattggtcatgaattcgtatacttagttcgtctgtcaatctagtgtatgtctctctatgttatctccaaaagagaaatgatgttcatcgtgaatcagcaagtcacctcgtcttttcgagttatcttttactacaagttaattttccactgcgctgtaaataccaatcttgtcccggcccattgcatcaccaactccaaacccttggtgtacaactttcgagaacattcccatcattccaaggggcaaatcaaggtgtgtaatattgccatgccacatcaattctggcgacctgactggcatctggccgagctttccatacatctttagcccagtcagatggggctattggtcttgtaagtcgtccgtttgcttctaatttagtgctgttgagaaatcggaagcttcatttaaacatgttcttcgagatttattcgatgtgtcactagggattgaataaacgggggaggtggacaaggggctattcaaaaccgttgaagttgggggtgttgaagagcgttagaagagacatatccccaattttcccgaggcccccagaatcgaacgcctctctggccctcccgagaggcactaaaggcgaggggagcgttgaaagttgagggacacatcaatgacgactttggcatcttccttgtggcgttgaactaggattgcttggatttgggggtaaccaaacctttgagaattcagataagtgcggtcaaagttgcactcgcttaaacaggaacgagctactaactgcgacgtttgctgtggctaattcggttctttgaccaaccggcagattgctatcctaaaggatcgccaccaccaacaggtggttaagcctcggttgtctcaaccatgttgtgtaaacttctgttctggatcacgtcaacgcattaaaggtgccagcactatcttcagtcttgtccaaggcttaattctgctaattctacgtcggagagacccggtgatatagtacctcaacggcaattatctcaccccacggtcccctcgccatcataacattctcaactatattaatcaagttctcaaatcggtcatggttcatgcccttgtggaccatccaaggtgattccgccactcggttccttgcgtagagtaggttttgatgtatagtgcggttcagcctattttgcgtagcgtacttcaactgcatcgaggaatgctgcagcccttgaaaagagagtcaatttgtggacacttaagagttcaagttcatctcgatcagtttgaacaaagccaaatctgcaacacaagcccatagcgtgattctgttacctagccttctcgcttcccctaatccacagccacttaatgattttcacgtcatataaatcatcgagatttgaccttcatggaaaggttatcaatccagagaacgatcatcacggccacttcctcaacgcctcaacagtacctgattggaccacaggcggcgaattagtttctgttgtcatatataaaacgtccattctcttctgtctttgtcttgctttgtttttctgtcacctgatacacaaaaaccagcagctcttggcccgtttagcttgggtaaggttcgagagctcctatcactcattttattaagtggagtcccagccattttcctaacatctcgcaatgtgtcttctgtctcttccacctgaattgatcttgctcgttgcaggcaatttggattcgccgaaagactttctcggcttcctcctaactagcccaaaatgttacaatctcctgatcaatgagctttatcaaaagaatgtccgctctgatggtggatcagcccttttgtggtacgcgagtcgtggggccgaacttggagtccggaatatgctgcgtgcgggtgcgaatgtgaatcttcgatcaccgaatcgggcacagttgacagctcttctggaagctgtgaagcacaagcataccagtgttgtacaaatccttctagagagtggggctttgccagatgcggccgacgcccgatccagaagacccttggctttggcgacaaatggtcgtagcgacgtggcgatcactaagttgctcttagaaaacggtgccagggccgattctgctgtgtttgacaagcatgctcctttatttgaggctgtccggtcaagccaggaatccaaagtagcattactcttgaaacatggggctgacacatacgtcttggactgtcgaaccgggatgaatctcgtgtatatcgcggcttctaagaacgctacttccggaattataaatattcttatagattcgggtatccaaatagagtctcaagatgatatgggaagaacgccacttcaagtcgcagctgaaaattcatgcacacgtgctgtgcgcctgctgttacaccttggcgccaatccgaactttaagaatatgaaccagtatcgggaaggattgagtgcacttttctacgctgcaacaaatcccaacagtcccggtaatggcaataaaagtatcatccgagcactgttcatacatggggctgagattgatactgaaaatcacgcttataagacgcctctactctatgccatctctcaaagtgctattaaacaagcgcaagctcttgttgaatgtggtgccaatatcatggctagagattccaatggagaaacggtcctccatttggctgcatcattatcaagctgctctcctagtttgatggattggcttgtcgaaaacggagctgatgcaaattgggccggcggccagcgtaatgagactccaattttctacgctatcaggaatttttatatccgataaggggtgggctgatgtgaactctcgggatatgcttgggctcacgccattgcacaagattgtcgccaaagaggagacgtgggaagcagctggggagttgttaaaggccggggctgaccgatgcgccatatctaatgatggaaagttccctcatgacatggttcctgatggcccttgggcggaaacgaaacgttccttgatccgtttttacatggcctgactaacattaccatgctcagtcacctttagaaaagctcttaattattttctatgtgcataaccattgcaggcaaatttgagagccccaatctccccatgataatgatcaccatatagactaccttggaaacatcttggtggacactgcgtactctagtcgcttgacacctttttttgacgtaaaagcagctccacgtacattgacatcaaatcagaaatccgaaagcctgcgtgacatactgcatgcggtgctgcaaaatttcaaggccattagccttatggaaggcagaccatcgtacacactacaaacatgcctagtcctgactttcttctgagtgcattagtcatgtggtttgtcattattcttggggtacagtgtcttggggaatccgatgtcaactatagttgttcttcgtatttattattcatctcaagatactgtccatctctacgtgaggcccacagttggctctttttttcctaagacattttgcaatattagtgatagacactgtcaaaaatgcgtggtcgagggtccaattatgtacttgaagcttgggtgcgtggacgccgaccgaaagctacacatttattttctttttagaggctaatgccgaagctggagacttctgggaatgggtattggttttcttgggagcacgcgttcggttcccagagggcatgtcaatggtttccaggaatggtcggtggtgttcccaggagacaatgggatcctaggaggagcacaatagtctcctggggccactatctggcgtcctggaacaatgcagtaacatcctgggactatatagtggcaccctggggctggtggacttctaaataactatgctgagatcatatatgctctgagtttgggagataagatcataacagagcgctcttacataccattctgggttgacaccctactgcaatcacaaattgcctctcgtttcgctatggtgaagtgggctatctggaaacacaactgtaatttttcttatggcacatgtgctggaattacggtgcccatactcacatttttacgtccaactcttcgtctctattcttcaagctacctgtcatggtgtatctagtaccttacagggctatccacagaaagcgccgttatcaagagcccaattggttcgctcgagtagcgtctatcaacagctccgaggtatgcaccctaaatacgctttagactgaaatttaaaatacatcaattggggtctacgcgcacgagaaacattgattgaaagcacatgtgcattctcagatcgttttgcgctggtcatcagttcctagttttctagtccataaaccaaaaatatccaatcattggcctcctagaggtgcccctttccatgaaaccgatgtggctccttcggcatagccatcccagtctttgaggacgccaacgatcccttctcggactttgccaagggcctcttcaaaaagggtcaagcgcgtgatctggttgttctgctgctgtttcaggtactctctttcccgaaacagctgggtgttagtgatacgcagctcgttgttatccgctgcaagactttggtcggcatggtgcttggaaatgcatgactcccacaggcgccgatagagccccacaagacgcgctgcttggatagcgagcttcgggtcttcttgctccattcgctctagggtttcaatggcaggttggaaagcctctgccgccagggcgcgcttctcgctttcggacgcggaggatatgaatggctatagtgttcagtgggtttctccgtaatcatatgccgcaacttacaagatgaccggtttcacactgcgagcttcctgttgctccattttcattcgtacttggctgtgcaaggttagaggcttgtatctcgtttgtatctggggacttgtcagaggtgtccatgatcgatgcttggatgcgagatctgaatctatatctcgaagaacaacgccttctttataggctcacatcgtcgtacaaaattaatttatggaccctttcttgaagcaacgatacttttcaattccgttgattgtgcatcgcacctcgcttttgttgccatactgtgtcggtcgtgatacgggcacaccactccgtttgtgtaaaccatagaagatagaaggcgctcgggtcgtcggatatgcgtatctgataatgttgtcatgtcataccaacgggggtttgaacattgttgagttagccatcattaaaaggcaagtctgggtacgtgtacaataccaccctcatcatgtgaaccaccccgacttatcttgagtattccggttccgaagagaaaaaagaatccattcactgccctcaattttgatctcaataggataggctggaagtgggctagactggtcgccaagcttgactgctacggggctgcaagaaggagattacaccaattcccggttttgctacccaacctagcagagaggatgaagagctactttcttcttataacaccatcccctcagtttttcgactcgatactctaccttagaacgatgcagtgagtatcaaaacgtaaattattgaggacattgccccaactatcgagtcggagaaaggtatttggtggtttatattgtagatataaagctatctgaagatccagaagccctgcatactagcgttctttacctctcgcactcagccgcaatggcccacgtcgcacgcaaaaggacgcgccagagcgctggcgatgtttcagaggcaacacctttgctagaaaggtcggcgagaaagacagaggggggtttcaatcagcaccctgaaggcacaacgagcaccagacgattccggactcagccatctttggagaagaaaaccaccctccgactacgactccgacaggagtactttgatcctgggtccgaagaggcttggtggacgtctctttcaacgcccaatccaaatggcgaggggcgaggacacaagcagctagaggagaacgccgacagagaacaagctcgactcggctggatgcagcgactgcgccctaaacctcatcgacgactctcttagacagaacggttgaatatggagactatatttcttgatatggtgaattgagtaagaaggatgctatgtacggagccaaaatgtctactatgagctatagtgtactgaagcggaccagatctgcctgaaaatgagatacagtatgcaagtccgatgatgattctacttcgcatgcacttttttagattctgccaatttctgtagagcctgaaaaagtgacgtcgtagaagccaagaatgactgacagttggttatgttcagatggtgatgtagagcgggaagtctgctacaaaggaattcaacagtctatactggctccttgctgagacattcgtccgttcaatgcacaaatagctaagctgccagcgaattgccgatccaagctcgattgtggtcgcgaagggtggttgggggatcgttggaggggtcatatgcagctatcctatcgcttttttgtggatgattcatgacgtatgctgttagtaggtgctccgagttcgtcaagcgatatggggaagaaaataagaaaatgaccggatctgctttgactgagaacgagctgcatgtgaatggttgtgcaatgtttcgactgtgcggtcaggcctttgatggccctctgctttatataggcagaccaacagccaaatcttatctcgtacatatagccgacacgatttggacgtgtccagctctctaaacaatctttgcttgggttggtggtcatgggatcactggtcgttagtccaccaccaccgagtggttgaaccatcgtttatgttcaatctggaggccattagctagtagtatatagtcaaggccgtagtgctaagggctgctctctttggagattaccgttgaaatctatttacccctactccaatctgttagtccgttactccgttaatccgttaatccgtttgaagtctaaccgttcggtggacttcgatagatgcttaacgaaccgtcaagcgatcttcacggatattacgaccctatgacaacttttttctagaggaaatagttagttattaaaaacgtagctgataagtctcgtatatttatccgtattaaaagaaaaagaaatgactttcaaaagcaacgaaacgcgcgccgcgatgagatagtaatgtcgagaggcgctatctgtatatatctataccttttttccgtctcagatattctatggagaggggaagctgatgaatcttagataatcgacttggccttgatattgtacctagctaagttcgcctctagctataagtcgaggacggatacgcttggttagtgacggaatctaggaaattattattgtagtcgagcttaagtaatagaaccgtcggcctatttcgggctatatatgaaaaattgggccggtcgctcgaagtagttatactgtagaccttataggaatctgtctcggggcgggacgatgatctaggggaagatgtaagatatcctctacctgctaggtttcccggtactcaataaagatataggaagatataagggtgtaataggatgaagacgggttatttatagtaaaaatccgctaactggaaggcgcgaaccgcgagctaggggttgagctcgatcgtacttaggcccggctagacgacgcgtatagcaaaagcgatcgattctaggaaaagtctcgtcggcttcgagctgaggttaaagctagctcgctccgggctagtcggctagaggctgaattgacgcgtgttagagcgggagtcaccgaggcgatgaaggctttataaagccataggaactataatagtagctcgccggcgggagaacgcgatagggattgatgtcagggaataattcgcgaagtggcaccgtaaaccttgaggagaggttctaatagaccgacttgctaacacattgttttgtttttttatgttctgtaagcacatcagatgcgagcatccgtaggaattcccacttatcttatcgagcctacttatcttatcgtaacctcgataagtaggagtgggtggatcccaagttgaacccccataataggaaatctcatattgtttgtagtgaaaacacggctgtatcacgaccatcacgcgtttttacgcgtcggtaagctatttctggtaatatataagtctcctaaaaaggattagccgcggatgagctgtgattgaaacggcaagtgtgcgtttggtttcttagacagaaaagtaataggagacgactatagatatatatatgtatatatacttcggattaagagaaaggttttgtctaataatgccaagccgtaggaagtgacctaactaataccttataacccctaaaaaccaagccgaaagaaacctcgtagggaatttactctagtgattaagttgagcgatatccgaaagtatatcagaggtctctacgtagacaatcctaatacggttagatttacggtaaagacagctatatctacgcgacgggatttcccgcacggatactaggcgcgaatatcatgcgcttcttatgcgtagccgagaaaatcaagttcgtggtacgtatctttgtttactatatttactagtatttttaattcccctttagcccctaattgctcgaagaatttactctgcctggtcagccgtagtctcgtataatagataaggtaggattatacttactcgtagcagcttattaaccgatagtcggtttagatcttccgggagactctaggcctcggggctctattttgttcctagagagcttcttattattaagctttagactatattagctagggctattagctttagagttgcggcgtctatctcggtcgcgtcgatttagtaactatgctccgcccccgctatatattcctcgttagtattacctcccgaaggtattcgaaaattagactgctccgtacttactaattttaacgataccggactccgtaagaaagatcgtatcggtacttaaggtagctagtactctgccctacctacggagatgctttattccttttaggacctaataatcattagctattagtttcttaatagtagcgaccctttccttcggaaaggggagggaaatagcccgtacgccctatacctaccggctaaacaatcgcggtgtaacggataaaggtccgtacaagagggaaacacatgtaaacctgcacaggctcgggaaggaacatctatgtcatcatacatctgtttcgatgtcgatccgtgaggggttcgtcacatgaacataggcagatagatttccttatagtttaggaccccccaggggcccctccgagactggcaagaattagtcttggcacaccatcaatacattgtgttccctccacaaagccctttgtatcttacccggttgacaggccgtacacctacataacgtatacctttacaattctaattcttcttcttcaactgcctgagatacaatggctccctcaacccgtcagcaatcccggggaaataccgaactccctgagaatcagccccgatcgggagacgaaacggagactactggaaccgaacaaacggaaccacagacccagggaaatataaccaaccctcccgaggtaaccgcggaaactacccgactcatctaagaaaggatccgggtcctcgaagccgaagcggtacttcaggagagacttattactaccgaagaacttatcgaagcaaaccagagaaagctcgagagttaccaaagaggaaagaagtcgaaccgacctaggaacgaaggtgattcgacatcggagagcgagcgcagtcagaagggcgagatcaaaagagacgtcgcgatattcgaaaagaactatagtatcaaaaacagagaaaactggctaaacgacctcgatgcccttttcgaaggagccccgaagaaatacatttcgggaaaacagaaggttttagccgctacaaatttcctctgcacagactacaaaggaaaatgggtgattcataagcggaactaccccggagacgcaagaaactgggaagcatttaaggattagaccaaaactctactccaaaattcccacaatattgtcacagatatcttagtcttattcaataaggcagagatacacccataccaagacccaggcgtcttcgaaacctacctcgaatcgctagagcgtcacctactagaaaccaccgaagagcagaaagcacaaaccctctttataaaattatagaaacctctcagagacgtaatgatcacatctagcaacggtaccttaccgaagactagaggtaaaatatcgaaactagcatctaccctgttccatgtccattttccaccttccaaaagaaaggaccaatcacaacagccccagtccaagaaacgaaaagaaaaccctaccaaaataacctcgaatcggtcccaatccggctcctctactaccaacccgaccactttcagaggaggacgcagaggcaatcgcggcagaggaaggggttaacacaggggtcgtggacgtaggggacaccgaaatgcaaaatcaaatacctcgggagcaaacgctacctcaacaatagactaaggaaacagcaccgaagctgccgcgacaggggcatatttcttttgtggagataagaatcactgggcaaatgaatgtccccagaaagctatcgtctaaacattagtttaaacgataaaagaaagcaaatcccaagcatcagggaaagtaaaagagctagagtaaatcccagtacctcagctcaatatccactcattaggactgctacacgcttacatatgccgattacccttaaaaacagcgacgaaacacatgtggacctagacactagcgcggaatatgatatagttagcgaagaattcgctcacaaccaaaagcttcctcctaccccattatcctctctatcactaagaggaattgccctagaaaggctacgtacacacagtatatactaggtcaaattcactatcaaagattccaggggtaccaaaaaagtcgtgaaacggccatatattggtatcgaaagagacccacgtctagagggaagccctatactcctatccagaacatttattaacgaattcgatatcatcctacaaccgagtatagatcactagtggttcggagtcaaggctttcgagttaatgaatccacacaagtttacaaaaacatcacggaatatagctatcatttataccttagttaaaatgccggaagaaatctagttaccagacaaagatagtaaccatcctcacctcaatatatctaagattccacctaaattagaggcgtatcttaatatattcgaccacaaaaaggcagggactctcccgcgaaccaagtcatccgaccatacaattgagaccgaagaaggtaaaacccctccttatagaccaatctatcctctctctaggacagagcttaaagaattgtgggcttaccttatggataatatcaaaaagaagcgaatctaaccattaaaaagtcctgcgggcacaccgatcctttttataccaaagaaggacggaggtctacgtctttatatagactaccaaggcctcaatcgcattacgatcaagaatcgctacccattacccctcatttcggaaatcctagattgtctctctggagtaaaatactttagcaaagtcgatatcaaggacatatactaccggattcgactacaagaaggtgacgaatggaagacagctttctatactagatatggccattttgaatatatagttataccattcggcttatcgaacgtaccagccaccttctaaagctacattcatatagcgttaggtaagctagtcgacgtcgtttatatagtatatctagacaatatcttggtatttacgctcaatcgcgaaagctataccaaagcgctataacaggtttttaagcaactaagaaaagcagagctctatattaaaccttccaaatgtactttctatcaaagggaagttaaattcctaggctttattgtgaatagagatagggtgaaaatagacccagatcgcatccgagtcgtctaagaatagaaagagccttaaagctaccataatatccaagtattcttaggattttataacttctatcggcactttatcaaaggatatttatacatttccttacccctgacatccatattaaaagggagtaaaaatggaaagaaaccaggccaggtcgcgctaaccggtgccgaattggtagcatttcgcaacctaaaagaggcgttcaagtccacatctctcctttaccatttcaatcctaagcaacccattcggttagaaaccgacgcctcaaataaaggaataggaggtattctcttacaaccagacctagaaggacgatagcacccagttgccttttagttaagaaagttctcaggcgcagaattaaactatacaacaccggatcaagaactattcgctatcgtacactcctttcaatactagagacactaccttaatagcagcaagtataccattgaagttctttctaatcatgctaatttacacacgtttataacctaacagaaactcaatggaagacaagcatattagtatatatttcttataccttttgactttattataaagcataggctaggcaagacaaaccctgtagataggctatctagaattctaaattccaagcaagcagctctaggaatggaattaatgaccctaattcaaaatcgaattataggcaaggagctcccgatccaaagtcagatcgaggatactaccactcttataatccaggggattatagggataaaagatctagacgtagatctagagcatgatccaggggaacatgactcaaagcatatatcaaataaacataactcacaatttagattagagcctaaggccgtataggaaagtcctggatccagtgcacctacagggataaatgcaaaacgcatcagcacagaatcagacaattggtctgaatagagaaaactctacaacgatctagatataccattcagtatcgaggatactacaggggtagttatccagtctattagtacagatactaaagacattctccaatgggttactaggcttcaacaagaagaccaagaaacgacctgccgaaaaggggacatttcggcccagaaaccaggcctaaaaggctagggagtcgatacaaccagattactatagtaccgggggcgtatatatatacctaaaaaagaaggcctacatacaaagcttttgtaattacaccataataaacctcttatagggcatttcggccgcgtaagaacagaggagctactaaaacgcaactaccactaggtgaatatacaagaagatattaaaaaatacgtcaagtcttatggagtctaccaaactacacaagcgccaaggtatcgaccctatggtaagctcgaatcgttaccaattctatctaggccgtttgccgagttatcaatggattttatcataggattacctcaatcgatctagaaaggtcggatagtagatgccattctggtcattatagatcgcttctcgaagtgatgccttttcttcccagtttcgaccacaatagacactacagaattagccgagctattccatcaagaggttgaactaagatatagaccacccaatggcatcgtatccaaccggggatctgtctttataagcaggttttagtcaaaactatactatctttccaaagttaaactccagtattcgacagcgtttcacctacaaaccgatagttaaacagaaaggatgaaccaaaccctcaaacactacctaaggtattttattaataagtaacagaaattgtagccagcacttcttcattcagctaagtatacttacaataatatggttaatacaaccacaagcatatctccattccaggtactcctaggttttaatcctaatttctaaattcacggtaaggacgcctgcgttaagagggaggcgccagctacgctacacagatttgaaaaactgaataagctgcgcgggaagctatagatatcatggcgaaaagctaccaaagcacaggcgaatcagtataacaaacgccatcaagcaatatccttcaagaagaacgaccttatgaccctatctaccaaaaacctactgttaaaagaaggaactaccaaaaagctatctcctcaatagatcggaccattcagaattttagaatatatcagaaagcaggcgtaccacctcctactcccagacaaatatactgcgattcataacgttttccctatctccctcctccaaccataggaataaagagaaggggaaccagaacaactactactaccagaactagcagataataacaaataggaggtcgaagaggttaaagatgaccacgttttcgaggacaaattacattatctagtcaaatggtagggctagccttctaaatacaaccaataggtcccagagagtataataaccaacataccgaagcttattacaaaatacaaaaaggcacaaaagacgcaaaagaaatcaacctaagcagtatctacaccaggccgctatcgaatcatcatagctacagtatccaatcgccataaggaaagacagtcatacactcctcgagcattacctccacatccggatcatcaagcaactccactgcctcagagcaagtttattagaatgaaatcacagcacctatccaagcagtaagcgactcctccgaattcataagtcagggtcgttccaaggcctataccgcaaggatatcccagggataaacggcagcacaagtatcccggtcacctataggatactcagcaacaaaggccgcatagttatcacaaacagactgggaagagatattagcgaaactatcatagagaagaccagattcgccccaatacttacagtaggaatatacatcccactcagactatggttcctacaatacactctcacaagggtatcaaaagccgcgaccagatcgcgaactatatccgcaactacctcgataaactcagaagggaaaaggaactgtacttctttatcatccttatccaatacacccacagctactctaagggtccttctggtcattaaccaaaattactccgcccaggaaagaactgccagcaactagaaacaattcccctcaataccagcaggaacctagttctaaggttagtacaagttctatcagaacgcagccgaaacagctaagaagatataccgaatcacacacgtagtacactttcgaacaacatgcgcaagatttgctatacagcgcatcgatatagcactagatcaccaaagggaaacaataatcatccttatccttatcccaatctcagttagacactcgcatatataatagacaccaggcctaccgacgaagaatagggtttataatggttttccaacgcattcccttcgaaccagcagtctttgccattacactaaggatttagtaccgttatacaggtaaaacgatcagaagaaggggtctagaaatcatagaaaagcagaagggaaaaggtagtaattatactataactacaatcacccactgcaaatccatcaaaggaatacaattatatcccaaatgacagctgtcgcaaacatgtttctttatgcaaatgcctataaagaacatggctatagaggccagattcacacctctttaaatcccctaccaccagaaatcctgcacgaaaagctattcccagacattctctatattatagaaaaatatcaatatcctacagaacacagtcttcacgaaacgtgtacattctggcagagaatcagtatagatcggaagcgaattccaggagtctatacaatgcctctctactgaaaagataacgtatacccatatattagtggtcttgaagaaatataataattatatagccacccttctaaaagaagcataaaacacggagtatataccttatcggtcaccttcttttcaaattgttatacaccaccttatcttctttaatatatctaccgctttactttctttattatggaaactccctgatacctccccgattctttatcttttcgtcccttaacgtttctgtttgcacatagatgaggacatccgcgcagggagggggagataattgtaacggataaaggtctgtataagagggaaacacatataaacctgcataggctcaggaaggaatatctttgtcatcatatatctgtttcgatgtcgatccgtgaggggttcgtcatatgaatataggcagatagatttccttatagcttaggaccccccaggggcccctccgagactggcaagaattagtcttggcacatcatcaatacattgtgttccctccacaaagccctttgtatcttacccggttgacaggccgtacacctgcataacgtatacctttacacgcggcgagggctcctttgtcgatggagtatcgcgaccctagtacctagcctacggataactcaaccgcttcctatactaggaaatcctgacctctataacgataatgctcgagtaggttagggaagcttcgatgggcaacctagtgtatcgtctctactaacgactcggcggaagagggctcctatttaaggcgttggatgttgactaacttggccttattgcttcggagacgggcgaggaagattagccgcccgaaaattcgaacggtcgactcgtaggtcagctatagatcttcgtcgacttatccgatctttggtactacgtttggattctttcgctaaatgggagcgggacgagctaagggggatcctacggtgaatgtttcgggctaggagtcggataggtatagccgtgaacgagaggcctattcgatttcgagatctaaatcgcgctttcgctttagactaagccatatagtccgtggtcgaacggggtgagcctgattggagtctattataaaggcgccgtatggagagggttgctagtttagtgatatatacttaggttatggtgcgatcactttatactccagcgtctacaaatctgatccggggcacgtctactcgagagggaactgaaatgagcgggcgtatttgattctccggccgtccgatattcatacggtcggcagaagtttgcgcgactgcttgcacagcgatggcaactctttgtgcgggtcgttcaaggcctgtcctcgtcacatgttgacagaattataatctgcaaccatccaacgacacaagaaatagggagggtgcaccatacatggtggttcgtggacatgaaagaaacagccaaaatgcccctagctcggacgatgccggagtactatatcattgggccaacatcttgaatttgctacgtagtaggtacacacgcgacaagactccaacaaacgacgcattgctcttggcatggatgatttaggattgacgttgattgaatacaacaaatgcgcactggaaggaggcgggatatcgctgcatgcccggattttccctcagtatcgttacctcactccctcaccaaaccatgcgtgccacaccccactactggaatcgttctggaggctgtcccctccgcgccgaccgacggagctcagataggtcagacgaccccgaagggtcggtttgttgtgcaagtcgagctgaccgtcgttgagtcgatacaattggttggctttttaccgctaacccatccgtggccgagcgacccggagaggacctatccacggaacggtcaacggaacgggttgatcgatggatttgttgctcggaagacaccgattcgtcgatgcgtgtttcgccactagggccgtctgtcctcaaggagcaaatgaacgcgtcaaaagctccattatgtttactgcttttcggtcagcgacagcacacaagacaccatcaaagagggccaattgacgtaccatattggacaagggggattattctcaggtggggagaatccgagccaagtttccatacaactcaaatggacaaaaaaaacgcatcttccacacttcagaactacagggtcggcttgggcttcctgaaggcagatcaggcaattcatgtgttctgagacgggcaaatcattgagactcttgagccgcaatgagtgcgatccgcgttcaatagaataagtggctggacgggttgaggaaattcgccagggtacattattctcccgcagcatatcgcgtgtgacatgtcgtctggtgatacgggttgtctccggtcgcacaggcgcagccactggtatgtaaggtatattccggacagccgcatcataccactgttgtccgagttggtcggcctggcgtgtccgatgccaccgccgacataggaagtgggacgcaatgtcgcgcaggatcgggaggtcggaaagatcaaattgccttctagcaagggatttcagcttattgcgaccttcatcaacgtcattcactgtcgggtagagtttgcaatatgtcccgtttttggtgaggccacaacaagtctgctggtgcctgcgaagacccatttcacagatgaccagaggatcccatcgctcctgagatgacggcatgatgagtatagatggttgttgatttggcaagagagctcgagaaaaagagattgatgaagacggtctcttcgaccgcccaagagtatttatattcataaatcataagtctattcttggagtttcccaaataatatacgcaatgctgcctgttgaaacagatacaatgaatggctatgacggcgatatcgctagcacacgctgatcgggataaccagtgggttgtacctacatcccggagcagtcaaccatggccctaggagcagttgagcttgcggcaatcatttactccgaggaagtcaatgaatctccacggaatttagccatgaaattattttcgacgctcattgctctcgttaagactagagccatgacctggcttgatatcacaggagttctacctagtggcttttgaggtacttttgctcaatctaggtattgtactctctacgacgctatataacgggtgtcgtcctctcttgcaaatgtactattttctagttcagctctcttttaatatatatcgggactctatctttcaatcgatactcagctagattgttagaaacccttactatcgactaatatactagggtattagggacaatagaattaaatatcggaacgacgtgctaaagatatctcgtattaatagtgcgatctaattaggcctattccgaggaggctttaatagccttctttatgaattagtccttataggtgcagtaaaatctatattatatacaaaatataggcccgataactcccgagctaagtagtatacctaataatagatttaagaatggattgctaagtttaatcaagcagatattactcctataaccctgaatctaaggatctataatatagactaactggtatagtattatttagctatattatctcccgcggtatctatataacgtgctagattgattcctagaacgccggttacgttagtatttcgaagttagagacgaagatattaggatgatattgtaaaggctaaagaagccctatttaaggctataactaaggtacggctagaatttatcttttaatacgttagattaggttcttatattagaagggctctaaggttatatagtcgctaccgtcggtctcctctccctacaaaatcgatactatacgagtataatattggtagtataatagagtgtatcttccttagtaccttattagccctacttacccttctgcaacttatatacgataaagttgctcgagctattctgtagcgttgtcaatagaatccgctaataagggttacctactatcccgtatatctattattaagaagaacagttaaaaaccatatatatataatagaacgatctatagtacctaccggattgacctacccgattttgaatactccaagtcacccttatcttaattgagattcggagtgggtattatctctagagatagggtagtcgacctccgcgtacggtcatattcgaacgctagtctaaggatactagctaccggtatggcctgcgatatagttaaggtaagggctggttcgaatttatctagtgcccgctctaactctcgcgtgagtgcacgggcacgggataaatactttcgatcttttatcactactaaagaagggtgtactgtatatactatacgcggagaccgagattatagacttctaggaataaacaatagagtagaactagcttcctcttatgtttccttcatcgaagaaataaagcgagttatcatgctatgtacagttccgctcgaaattagtttcaccatttcattctcattggttctttcttaagtcttggccagacccatctcggcctacatctggactagcccatcatttactatcaaataggaaaagggaaattaaatttcgctagctagactaggcctagcattagtaaaactagacgttgagaaggaatcaaagagaagaaattggtgaaactgatttcgagcgcgtctgtagtgcggagttcgatctcgttgacaaacacgggtaaccgcgcgcgcccgcagaaaacccaacggctagcatataggtaatatttacacgttggctgaccattattcaacataacttagctgcccatttctgcgggacctggagcattgcttcccgagctggcatctaccgttgctgcatcctttttaggctcctacgcctccgttttctcgaccacgctgttaagaatgacctcaaatgactccgagcctcgggaaccttcttagataccgtgttctttcagaaaatagtccgttacagctcccatccgctggctagccttataaataagatcagccaatttgctcacttgctctagctcgtcggtgacctacgttagggccttccgcgtagtgtttaggtcttgatcgagctttacctagattttctctgcacgaattgcccgcgaattcactgcggtaagaatacaaagtatttcctatagaagttaggagagtcttatttaaggtacttgaatggtattatactgactagagtatctatagcttagctaattgagcttaaggaaaaataagtattactaggtaggtcctaaaaccctgatggtcgaatgaattaagtcctatagactcggtttatctagaggacaagcgaattagtacagttatactaccttagtcgatcaggcgactaaggcattgttaggttgagaacgttgatttctgcgggctagggcagcctttacgttgaagactagatcgctgaacggatccgaaaagaacacgctgttgtctccccgagtaaggctaaataacaagtcgacttggcgaaataaccgtcaccgagacacgagaagaagctacggcgagattatcgatggcgcagatgactataatcttgttcatgccaatatacatataggtctatggagcagcgattgttagtttgtcatagcgcacacagctgtccctaggcacagatagattactagatatcattttagttctactatatctatagtcctttctttacttgtgagaccatacctacactcctatcaagaatcctaaaaaggatgggactggaggtcatatacatcgttgttgtccgccactctcgtcaaggcgaccgacggattttccaatcctcttttcctcgagattactagacggtgagtggaatactggaatgtgaattttggctactaacttttactaggatgtcactgtgaccgttgaagatgaacaaagcccgtcagtagcctcaccgaactgactcgcagcttactagcggtggcatacagtactccatgcaagggaaatcggtggtggaatggccctggatggtgtacaggacttgaaggatgaccgttttaagaacatggtcaatatagttgaagaacttccaattataagtctgcatgacacatgcacatgtatcgtttaagaagactgtgacggcggggtgaccgtgcggtaaagtaactgccgtagagatatcgcagcattagatggcaggtctctctgaagtagacctaatagaaataattcttggagacgatcgaagaacgtgctggcactttcgttgaaggcttcttcaacaaccaccgacttgaataaccaccgacttgaataaccaccgacttgaataaccaccgacttgaataaccaccgacttccgctttccttatcgatgtgctttttaaacgttctcacttgaacgcttgtgcttaaacgttcttaaaagtgctttgtttaaccgttctcacttgaacgttctcatttaaacgcttgtgcttaaacgtgctttgtttaaacgttctcacttaaacgttctcatttaaacgtttgtgcttaaacgtgcttaaacgtgctttgtttaaccgttctcacttgaacgttctcatttaaacgcttgtgcttaaacgtgcttaaacgtgcttgaacgtgctttgtttaaccgttctcacttgaacgttatggtagacaaagaactcgcgttccccgagcctcaaaatccgaactaatttggcccacgtagatcactagctaagcgaagttacgagggctgtcggcccatttctatgggatatccgttgcgctaaacctttcagtcaccaacggcgcgtcaaactccacgcacattggataaagcctgtttcttggcggtcattgtgatttctcatactagcgccgaaaatccttcggtcggtcggtcggtcccgcaatgcttgtggttatgctccattcttggaagttcattaattgattgcagggatcgatccagagctcggatttatgtcctcgccagccagctagttcatagctagtgtataccagatacgaggccaaagcgcatgctaccttgttgtaattattccatcgaagcaaatattaacaaaggtggtcagtcttggaccttgggctggcaaaagaaatagtctcaatataaaatcaaaaatttgtccgatacagtagtactgtactatacagcgattttcgaaattaatttaccgctcgagcacacgcactttgtttctcggctcgtacccgaaacgggcgttgtctttattcagataagtggtaacataacatccactgataggctaggtttacttacgactactcttaattgggaaaggcggcgttttgggtacgaaccgggaaacaaagtatgagtgtctgaggggtactgtaaactgttttcgaaaatcgctgtattgtagttcgtaggaaccattttgtgttattcggctttcctgtcggcgatactcctgcaggatttgtccatcgggtgatagatcacatgcttcattcgtacgaccgcctgggtgggtccatggcttgctacaaggttagtagctagaatatcagctagcgggtcatttcggggctctctgtacagtagaatttagcatcatttcaaaccccgcctttaacctggggtagggtatgaagtctagtgatggtgttttgtgcgcggtagcgcagacgcaggtgttaggcaacacatgtgcttctacgtcaagtgtgattgtttccactgttcgaaacgaagataggacgcggataagagcagctcgttgcacggtgcagaggtatcgtaggtgggtcttgtctcgaagggaatcgtgctagacggtcgaggcgtagtcgacgaccagtgtgacgcacgttcagtttacatgtaagtagagaagcgttgtcggaaagtatacaagaggttgcaaggaccaaagcatgaagccgcgacacgatatgagagaatgaacagccagggaagagtatgctgctttcactatgcaatgactatgatctaaactggagatagggcggtggaggcccagacagcctttcaatgacaggctgtcgctaactcggctttcttcgtctcaggatctcagatgagacattagaatgcaggacaacccatcaattccatgaagtacaagctcaatgtgtagtcccaatcatggttgcttcgctatccttgcctccaatttccatactgggcaagttcgccgaatccgctgccaaagctagcatgggagccgaaagaaattcaacatgaaaagggccctggacgaatttacaagccaagaacaagatacagccgagagtgggcaaaatagtgaatgctggcagtcgaattatttatccaggacatctgaatactctcaaatcgaatactaccttttaatcacaaccataagtaaacgctacaaagatgtacaaacaccacaaatgaaagcctcaacgatgcataaagatggtggcaaacataaagaggaaagacatggtcaattgtcggtcttccaactgtgatggaagtgttggcccgatagtcgatttacacgaagttgttggcccagggaccgtttgttcactcatacccattaacactgtttatcagcgagtcatgttgaaacaaccgttaaacttagtttggcgcctacgtagagggctggaaccatgcaaatcctggctctttgggttgctttcctccctagttccacattcaatgcgactttaaagctcatactttcccgcttttgccactgtatctcagacgaccttttttgtctccgtaaacactatccgttgaaatcattctttcccgggaatcgttgcccgccacaccgaagatgccacctacgcggaagcccgcttcaaaggctcgtcaacgggcccctggtctgtccacttctgccagtcgcattgcacgtcccttgctagctgataatgagactaatcaccgatcctccacccgacaagaacagctgcgggaaacgttcgtgagtgtcccttgtctgtaaagccaaccataactaacttcggctcaaaggcaacaacgtcctcttcacaagcaaagaagagagagcaagaggaatggaacgaaacccatcgaggctgtctggatatcctgggcgatgccgatgatgactaccaaaagctctccgcacaggtgatgcaacaacggcaagaagctcagcagaagctgcagcagctccgcagtgagcacctccaagcgacagccacaaaccggcagcttgtcacggagaggcaaaaggccctgcatgagaagcaacagtgcctcggcaaaatccagcggctcgaaacggatattgctcagttgaaacagcagctcgagacagccagcgaccagaccacggagcaaatgatatcgcaaggaatagagagcgaattagagacggctcacggggatctgatgggtgtagccacccgactctggaagaagatccaagaacagcaaaacaaacgctttggtcttgaatttccgcaaagtgatgtgatgcaaccacccacttggacgaactcgaatggacaatttggagcactggacccgaacacgctaccgggccctcccatgacgaacgcattttcgttggatacccaacagacgcagacgatgccccaaatcaaccagtatggagctctttcttgagaagcgtcaggcattagtgccgttggagcgcgttatcgtcaatcgttcatgggtcgtgtaaactaatcaagtatcgaagtctccgcggcctcttttgtctattgactgggaggattatctcagcgaaacaatgaaatatgaaataaaatccaagtagttctcttaaggtcgtgagtgtatgcaatatcgagttggtctacttatcttggtgattggccagcacacgtgtattatgtcatccaacggtccctcgctagattcaatatggtttagtggtactgtaatcatttatcattctgcttcctcggcacggccctgttccgggaggggcggttcgtgctcgggccgccaaagtccctacataacgcccaagtatgttttggacttgcctattcccccattgttatggtgtcaatacttgacgaattgagtatttttgattttcctaggctgctctcattgaatggtgacgtgagaaaaccagcatccctattttcacatgtcacaagtggtgctctggaccgggaagcccaaacccacccatcatttagcgcccgcgtgcatggtggcgttaggaggctggtagatcaggggaaagataccattttcattttatgcttcgatcggcgcacactagtgtgatgggcgaggaaagtaaaagaaaaacaatttgagaaagataataataataataataatatgaaaggttacgcgaggcaacgatcgactgctgtggtcatttcctcttccgcttgtactgtaaccctgtagcaccgtcgctgagactgatatttattgattgctttgtgcggacctaccctcgaaactaatcctgcgggtctgtgtatcgagttgatgtcaaaaatatgctattttcgtttccccatccactaatcgcgcaaggcagatgatctgtcttctccagatctggtttcatcacatgccggcagtccaagaatagctataactactgttcgacatgttcgtccaccgtttttatcgggcgatcaacgttcgattcggatgccgtagccaccgcccggcctatatatcttccgtactgcctgatttgtctctagagctatcccgctagtcctatttcttttctaacaaatcactaatttcacagtttcgcaatgattccagacccctctcctggcatcacagaccggggtcatcccaagtttcggcccacacagtgttccctttcccttatccctcgaagtcaaactcttctgacatacggggcagataggacaaagaacaattgggatctacgtcaaagaccagcagtaacgctttgagggaaagatccgcatatatcaaatcaatctcaatctcagcgacggtgtcccaggttgcagggggaagaggggataaatgaccacagcagtcgatctttgccgggcgtaaccttcttttgattttaattttctttcagcctcctaacgccaccatgcatgtggcgctaaacgtggctagcgcgtaccataaaccagaaatgggtgggtctgggcttgtcggtctagagcaccgctcgtgacatgtgaaaaattagggatgctggttatctcacgacttcattcaatgagagagcagcgtaggaaagcattactcaattccatcaggtattggcaccacatcattgaggtaatagggcagctcaaaacatactacttcggcgttatgcagactttgggctgggagaccacgatagcatcttcctcgacatcaataacgacatggtagactcaccacaaattatggttttatggtagaccaagtgggccatatcggaaatgaggttgcaagttatgcttttttttcaatccttgactggtgtcaccgatatgctctctatagtggcccaaaacggaaggcgagattgctcctgagacgcgaaccgttgtgatcggacagatgtgccgcagtcatcctgcattagggcgaacctagtaagtctgggtacagtagaaaaatacagcatttccgattcaaaattacctcgggtggagctagcggatttctaaattaaatactctccgacactatcttactgtaacgatcggcaatgatttggaatcatgacttgctcaaatataacaatatatttctatggattgagaatgatggaatgtttgattccagtagagcagaagctgtaatatcgctgtgatgattaagccagccgttaggaactgggatagtgggtggtattcagcctgaaatgcagcacaaaaaagcgaagggagagtttatagcaaactaccatatttgacaccaacaaatacaatgttagcttgccgtgatagccggcgatgtcgatgacgatctcactggtagggggaatggccaatggcccgcgcattcttgttaacacgccggcgtcatcttatggcgaagctgatcaggtaggcgctctacgggaggatatgctgcaaaggatggatcatggaccgcagtgtgaagagaattggcttcttatgccatgcatgcagatcttttgctctatcgctttgtccgctgcgcctttacttccgctctcgattctcggattaggtagcatggaactgcttgtcacattgcggctcaatccgtggaaaacaatcgcatcactgtgtcggcctcttggggtgggctgcttttcgatccccgccgacggtatccttgcccttgttcctacccgcgttctgccgtaactctttcacttcctcttctaggataacgagtctctcccccagggcctgcagagcctgctgcgtgtttttattacagtcgcgctggaccttggcatattcttccatacctctgagaagtcacgtcagcttcgctctaacagtcataagcaaggaaaaaccatgtcgatcggatgtggcactgactcttggcgtagatctagactatcgaatctgaatcagcatggatctcgaaatttcatctatacaagggcaatatattgagacgtactcggacagcatcgtaaaagccatcatgatcgagccctcggggggatctccagaagattggtccttgactgagccctgctcatgctcggccccttcatcggcctccatagcccagtcattttggtcgtcgtcactgccttcgtccatcggggtgatctcctcttcggaatcagattgaccatctgcttcgtgagtttgatagttcctgccggaagaagttgacctgggaggactccatacgttccttgacctatcaggttggggtgcagaccggcataatcgactccggtaactcgttgagtccgtgttgggaaggtagtcgcctgcagtgaccatatctgtcttccaggcttgacgagttgattacgaattagatttagagtgaaaaactaaattgatatgggagcctagactcctttataagtcaaatcaggcagcatatcgcaactgagcctggagcaactaacagggatttatccctgcaaaggcaattgcttttgagaagcaccaatagaacaaaacgtagcaccaccccacgtcgattgctagaacagtagttcaccggttaattttgatccgtgatcgaggacatgtattgcttgagacactagttgatcatgtgctgtattatatgctctggggcttgtctccaacgattctacctagctagccttccccgcttggaagctgacgcgaggaagcaataaaatgatgtattaattttatgttggttgtgttggttgtgttggttgtgttggttgtgttggttgtgttggttgtgttggttatgttggttgtgttggtttgggttaattaaagttaccccaatatagccaagcacataccagaaaataacttgatggcgggaggcaggtttccttccatgaacaatataaattcataccctcgtataaatgaggaactaagatcggctgcctggagggtgaacacttttggcttgcacggcgctcgaccaagaaagaccatagctgaggagatggcgaaatagattaacaggtagattggaattatgtcaaatgcaagtggtgaccggggtatggcatctatgaatcaccgttgatctccttgagctcgattccacatagaatgtctccacaggcaccaacccccgatagtttggaagtgttgcctgtttattatgcttctattgcgtagaaataacggtggcaggttctctttcctaatctataagtcacccggctttgtacatggccagtcatagcaatgtgaggctgtggccacaacattggaagggacgactgcgttatggaacttctgccagaattgagcagcgtatactgggagcatttccaaccttctcaagacatgctatctttcgtccttgaacaatctcagtcacatctcaaagcactggcgggacgtgaaagcttcgcaaggtttttagacgtctcacttataagtgacatactagcaaagagaacagaagtgatctttgaagcaccgagtccttgcgtatttcgatctgacaaggacgcagccggtgccaatatcagctggctcgacgttgtcaacgaaaagaactatcaggccgaacatcaaggcaatggtatttaccattttcacatgcgagacaagggcgtgattgttcaattatctaccttccaacacaatatgattctttcgggattgcctcggcagctggtgtaaccttggtcatacgagaaagatgtgcagatggagttgtgttccctagccctggcggcggaaatgacttcggttatgaaccaacttgcgtcggaaggtaggtacactcaaagtatggttgaccctactcactcgctcactccatctcgcagccattaaagtaaacaacactgtgctcgaggagataggaaaaagagtgcaggtacttcgccacttcccacagccaggtcaaagatcagcagcatcatcctttcccgagcgtgatctggtgtcggtcgagtcgcccgcgattctttcgacagctggggctgatacttactttctcgatgggttcgctgtcgagactcaagacccaaaagttcaaggcagtaccaaaaggcgcagtgctacaaaacggagctgtaagtttgggaccgagaaaaacacgaagcaacgatccccagaaacaggactgacaatatgaacgtgccagcctccaaaaacaagctttggcctccccacgtgctgaagcagcttccaggatggttcgaagaccaagttcagagaaatttttcgcaagacgagattgcccaacacttcgaagagaaattcgagcaaaaaaggacctttaatgctcttgaggccatgttgtataagctaattggaaagagtccctataggaagcgcgggaaacggtcctcggtgtcctcgagacctcgtcagtcttcaccacctcatcattcgtcaagttcattagacttgtttgaacgaaagatattgcggtcgaatatagatgtacacacattacatctagccccaagcattttaccatacattgttgcggataacagcgaagatgagaatcctgtcgcccacccagatgctcaaccgattgacttaaccccagagtctagcaactcagaggtagtacttgaatatggtcttgtaaatggagagtcaggatgcttgggtgcatcccaaggacacatgcttcagccaggtcaatgccccgagacggaagaaccgtcaaaagacctcccagacgtttcagacatgatggctgaagccccctggcagttggaagacccagatattgataactctattcatgcgattgaggccgatttgaggaggggtggttctcatacacctcaagggcctcccgtcgaagttgcaccaatgcagatgaatcagtcagctttgtcgcaaggcagccgaccagacaacacttctgggcagggccttgtagatccattgaatagggtctcattgaatgagaacacccaacatgaacctgaagacttcttcgatgcgtccagcctcgccagaacaaccaccccatctcaaacttctcagccaaaccgccatggcagctcgactgaggaccatcctctgaattgcggaaacagtgggacatccgccaatttcatcgaaggaggtttggccgaggaagaaatcgtacgaaggtgtcttcttgagagatctcaatcacagacggtgcgacttcatcgtccatggaggatcgaggttgtgaaccaactgccgcaatggctcatgacacggaagcatctatcaaaggacagactggaagttgagttcctaagggacttcaaacactatcgaacatcatctgccatcagtgctgcttgtcgcaaaaaaagaaaggcagaagcccgtcagaatattgcaccctcaagctccagcccgattttacaacctcgggccgtctctgtggcatctgacgctattgaaacatcacgtatgccgaacaccatcgcctcacaaggcacgtctagcttgaatccatcctacttgtcgagcaaggagatgagtgctcctgagaactcaccgttggaacggtatccacaacggactcagcagcagattccagaggatagagagggatctttctccaatcattcttttttctcgcatggcgaccaagaggcagtagatactatcccgcctgcttccgttgcctcgtcatgcgctcctgcgcaaacgccggtttcgcaacacgtctgggttgccgacgatattcttggcatggacaatccgaacgacccttccctagctcaatctatagcagtcaatgatgggaatgctctccaaactagactaaacgtggagagcaccactccacaagctcagttggaaagggggtaccatggagctctgaatgacggggaaagaggccggcaaacatcaacaccacctgaagtgccagtgggacaggaatcgaatgaccagaacggggcgcgaagaccaccccccaagggtaagtctgtctcctctccttagccagccacgctttcagtcccttgcttgtaacgtgtcagacttatccaactcattgagcgcctggcttctgactcacactcattcatatactttttgtccgcacactcatactgactaactttcttgaagcgtttggagaaggacaggcatggcggcatgaccgaaaaatggcagacagcacacttgaagccaccggggaccagtcgtatcttcccgccgttgacacccgccgcccgcaactggaaatatctccaaatctacaaaccacaccgcaggtccaagcaaaacccgtgaccgtgccatccgcgaataactctcggacctttcacataacaaagcaaatccaggatgattcctctggcttccaggcctcatcccctggagtagacttccgcagagcccataaagcccaaagcccaacccagcccaacccccaaatgggttgggtttgggcccaattctcgggcccaccgatgggccgtgggcctatagtaagggcccatgaggcttttgggggggcccattgggccccaaacagtgcaaacatgccaattcttggcatttatataagttatgtagaatttcctagtatttttgagtatttaagttaccgtctgaggcccctaattgactgagttctcataagaattgactgaaatcactgtttaataagattgataagattaactgatgagatcgattgattagatattagtggaggctaaactatctacgtgaatctaataacgtttatataaatcatccttaatatacttcctcttcctccccgatgtccgtacctaagacggtgcagtagtgaatctaatagtagaatcgttattatcaaccctatcgttatcgttatcgtcaatatcgatcagatccctagacctagaactaggtccatcaccctgctctttagtgttactgatctcttcagtatcgatattatccggtttcttaatactttattctcttaatacgttaatcttattagataagaggtcttctacttgtgagacccctaggtatggaatgcctgagggaatgctgtatgtaatggaggatcgggaaatagagatagtagtatacgcagtggtatattagaaactaatagctgcttctccaaagaagcaccatgcgaggataatatacaggttgtgggtcacatgattaaagggggctgtgcaggcagcacacacggctcctgcccagtccacagttccccacgtaccctgacaggtgcaatacctcaggcatcagccttcttagtactagggtcctgacactactacctcctttgcctcctagatattaaggttaaaccttaatatatagagaaatagtatcagctctttaatagtattagaatttagttaaccgcggcgatagtagtagatatcttgtatagtattgaaaagacgttctatcctagcgcctgttatagggattataaggatatcccttataagtatagtaatagctggaaaacggtattgattctctttctaaaaggagagcggttctaaatcagttatatctatataaaattagtattaagtggagagatggttataaagataaatatagagatagctatgatataattaaaagggtttaacttactactatcgagatactacgttatcttattatctatgattaggcctagcgttactttggagtgaggcttctattttcgagctaagttacgaagcagtgatcttaatgccgatctagaggaaggctcttataggccttaggcactagtaagacgttcctagataggtataagggtatctcggaacgctactcgatactgattatagagttctttagtatctgcctagttattagaaagaaagaactagaatctactatctagtaatagcattgtacaaactgtatagatatgcctacgtattttattagtctctttgtagtagttacgtaatttagtatagctagctttgagagagctaagtatctactgtttctaaaggaccctctttcgccttagctgcgttattaatctcttaagatacttaaagagcctattgtagattaaaaagataagatacgatattacctctcggctctttaaaagggtaagggtaaaattaaagaacggcttagtaagatatagaaggtagttaatttggcgctattgattattattaagtacgaagtctttatagttaaactaatcatagtactttataataaagacgtagagtctctttacccggcgtaatattagaaacgttgaattctatcgagttctaatatcctagatcggtataagcccttaccctaggggttagatagtaataaaggagtcccgacgctaggagctcccgcggatataaagagtaagataccgtactttttttagggtatacaagatatcttacttcttagatgccgcgtttacctttataagggtgaattgagtgtctatctatatcttagtagtattatttagtaggactacttttaaacgattaagcagttagtttaaactcaattagattatataggtaagataggggattcggataatattagtattattaggtaaagactattaaagagtattaactagagtcttattatttaatacgttgttagtagttaatccaaagactcggtacttaataccgtacttagtaagcgtctttataagtatatcacttagatttatacccgaatacgtcctataaaggggtttaaagccgagtagtacctcgcagtagacctagtcggcgtcgataaaatagctagtaatagctataaatacgtatctaaatagagatatctaacagtctaatacaactgagatcttcgtatactctagaagtatcctaagtatatcttactactaatctttgatactagtagatagccgacgtcgaactgtattagcggaaggaacgttcggaaggcttagggcggattgggctcttataataaggcgacgaaaggttagattctcaacgagattaaatagaagccggttaattataataaattgtaggattttattatcctatacctcttacgagaaaggttcttcggtcgtatcgccctagtttaaatactagttagtagtattgatccttaaaggataatatgtctttatatactatttaaagaaacctcgttattctatccctctgccggtgtctacttacagccctttaataggaagaagtattaatatggcgaattatcgttatcgtactataacgactatctttccttaagctcttaccttatttagccccctccttcctagtagcgtaagggtatttaagaattatagagtatttcttatatataaccttcgcggtactatagatagagtgtgtgacttggttaaattccttctagatcttcgcccagctatactacgagtcctaattaatcttactccgagatctatagtcagtctacagccactagttgacctaatcgttatagagtatcgcgttataaaggaaatactggcctctgctaggaccgatacattagaatcgtttaaaaggatctagagcgatagacgaaggaatagacggctaaacgaacgagaagctattaacctactgagaggtagacggggtagctaggtagatagaaggcgtatcgaaagataagtcgtctagcttagagtcgaatagacttaactaaaaggatctaaactcctagctttacgatataattagtgatagtcaatagattcagagttatataattagcttataggtaatggctttaagggaatcagggctagggaggaaaaactaacctaccttcttagtaagagaactatcgacgcggtaggcaaataaaggatataaatagaggattatactctatagtgctagtcaacattaaaacggagggtcgcaatactagtatctcattagctagataatatatatttagtggattcggcctatctaaagcctaaggaagcctatagataacctatctccccgcctattttacaatttgttcgtccaaaacatttcacccaatagctcgtaagatatctttaagcttctcttacctccggaatagctagaatatcacggtattgtaaaaacagacgtcgatagtaagatattagctatcttttagtataagattcaacgctataaacctacaatttatagatttgactagactgcggcacgatccacaatatccgtggatatccacaatccatatccgcaaactgcggatatggatattttttgatatccaagatccgcagccttgcggatttggatatggaccttatatccattggatatctgcggatatccaatggatatcaaacaatacaaacatgcctagactcgtgacctcaaggggtgtgcattattattatacattcctatgtatttttcgtgtaatacttggtactcgaggttattgaatattaccaggtaaaccgtaagtataatttctgaccttagtcagaaattatgggtagaaggtcaagtactgttctactcacagtagtatacaattggaatctctgaccatggtcagaaattcagtctatacattttttagggggtttatgaatttaaatcttctaggccctatttactattcatagatctaactggaagccatctggtaaccttggctgttttcgaatctaccctgaacggcctagcatactcccatcgaccggcatctctagaagcttatcatcctcttcaacagcctcgcatagtcgtttttgaggttattttccttttacccgtctacgtcgctcagcactatcattatccgagtcattatcaccgctctcagtatactgggtagcctcgagtccagtctcttgatcctcctccttattatcactgataggctccaagacctcaagctgtggtaatgatctccgggtttgatctagcaaagcagcttcaccttaggatagagtgatagcccgacagttatcctatctagcagagaaatatagcctactactaaacagctagttcggtagacgaccgggtaggactaccgagtaagctctactagtactatctagtgcgatcgataaagcctagtataagtagactgcggcacgatccacaatatccgcggatatccacaatccatatccgcaaactgcggatatggatattttttgatatccaagatccgcagccttgcggatttggatatggaccttatatccattggatatctgcggatatccaatggatatcaaacaatacaaacatgcctagactcgtgacctcaagggatgtgcattattattatacattcctgtgtatttttcgtgtaatacttggtactcgaggttattgaatatcaccaggtaaaccgtaagtataatttctgacctcggtcagaaattatgggtagaaggtaaagtactgttctactcacagtagtatacaattggaatctctgaccatagtcagaaattcagtctatacattttttagggggtttatgaatttgaatcttctaggccctatttactattcatagatctaactggaagccatctggtaaccttggctgttttcgaatctaccctgaacggcctagcatactcccatcgaccggcatctctagaagcttatcatcctcttcaacagcctcgcatagtcgtttttgaggttattttccttttacccgtctacgtcgctcagcactatcattatccgagtcattatcaccgctctcagtatactgggtagcctcgagtccagtctcttgatcctcctccttgttatcactgataggctccaagacctcaagctgtggtaatgatctccgggtttaatctagcaaagtagcttcaccttaggatagatactctttaataatccctagctcctcttaccgaagatcaaagttagtagtaaactgatatagcattaggccacagattatactcggcttcaattgaccataacggtaataacagatatcacaagcacagttgaatagtcgtttaataccagtaccactagcagggatagatagaatgtcccttactatcctagctagggtcaggaagctcttctcatattccttctagaaaagtcgaggtttctatcgctcaattccacgagtaagatattgtgcaatctcgtcgttatctagttttataagctcttctaatagctggttctgggatacacaagtaatatcaagatcacagttatcattcttattaatagctactccagaagtctctagtgctactaggtcattagtatcataggtaagcatcttcctatatcgattaaactctcggcttaggacctcttaataacgatttatataatcaatatcaccctgccaatcagttaaggaaaagtaccggagcttctttaatagagagaagattgttactagagtatagatatcactataaggctcatagtcagtagcagtgtagtacttagagagctttttctttactgtttggagtgcccacaatatccgtttcttctagatcacacctttattcttaagcttcacctcggctgcatcgagataggagaaaagcttattatagatactatagatattatatgcggtaatatcctttatctttgacagtatcattataaaatcaaagaagggctttgttagaagaagaagatactcgacttaacgccactcttctggatcaagcttaaaataaagatattgatgattagtataatactgatcatagaatagctggagcttcttagcccagttgagcattaaaaatattaaattctatcatatctgaatatcttagattagaattaatataggctccggctgaagggccataaatacctcctgacgttatgggcttatattaataaagactgctagtccttagatcttctatacttttattagtctagctattataaggatctaggggtagaagatataccttttttaatatatctatgatctggataccgctagaggtattacacttattctagaaggagtgggttttttcctcagaccactctaactcaatctctttattacttggcactgccttaagcttcctaagaagcttatttagactcagctggattatatgcgcgatatatgggacacagaagattaagatatctgatgaatactaagactaaaggtggtcctagatactctgtatcaaagtattattattagttgcgttatctatagtcactaataggatataatccgagataccatactctgttaggatctaggtcatagttttactaagattttcaccagtataggagccatagagaggctcaaagcctagaagaaccttatagtaatcccagttataatcaataaagtaaccagtgatagttataaaggcctactagaaaggagaagtccagtaatctaaggctattgatagccgatacccctctagaagtctctatagaatccccttctagttattctggattattatatcgagataacatcgaatggtttatactaatggaattgtaagtttagtagataattgttaagcaacctctaatatgcagtagaattaggggtattcgatcactcgaaagggcagatatacagtcgaaatgaatcttagaatagcatcggagagatagtcttaggtaaatgatatactagtagtacctggctagatcaaagtactcaatattagctactaaattataaagaacttaactactgtagtaatactagttaagtgctctagttaatataccattcttttgagaagctggtcgattcttaggccacttttttttaaacatgctccagttttgaggtgtgctgtcataggcgaagaaccagtataccggaatcttagatagccaattgtacagagacataccttatatataacctttagctttccatttttattatttataacctggtagaagctatcccagatatccgatttactttttgattcctatcgaattgtattcctaacatcagactgagatctatacttagttataagctaccaactaacgaatttattacgtaagtcctccatattatcacatatagaatcagatagatataaaacccagtgcttttgaagggaaggtccgacgcaagtaagggataagggtataagggttaaacgagttaaacaagtcggcgatatcgataggactggtgtttagatacccaaaaaatcggagaagttgttagggtaaatccaatcagaagctaaatccacatctgaattagtgaacgagaactatgattaagacattaagaagttaacaattataatatatagtatagtagggtacttaaaagaatagagaggcttacatctgaagtagtagaggttttcaggggtaaagtaagtatactaggatattctaacttagacttacttttaatgtggtttacctaaatgattggctgtattatatattagtgcagataattagaggatatcctacagattttaaggatatcttaaggatattgaggatatcttacagatattttatagatattttgtggatatccacaagatatctgtaagacctcgaaactcgcaaagtccgcatttcaagaacttctatctcggatttctcaagttctaatagtcagaacaaattgaaaaaataatcagtagatagctaggactctcagcttttatttaagcctaaggttgaaataattcatccaataataaaggttttgattttccatattctgtttcttacaaagtttatcattattaacagtcgttaaatatatatttctatatataacttacaacaaaatcgtcaatctacggccatctttacaacaaaacgtcggactaagaaaactacgacactacctacaaatactatataaggagaccttcgatacatatctatttcctaaaatttcaaagggccgaccgttgattaaaggggttggttctatcaggaccaaacatgcgtttatttcaacggtaaggaaatattggtaagctatattaagatcatatgacaggctacaagggggaaagtaagcgagagttatgctagtgcggatatccaaggatatccgcattgcggatatggatatcaactcatatccgcagtgcggatgtggatatcaactcatatccaatatccgcaaattgcggatataaggatcgatctgatatccattggagcggatatgccgcagtctaagtataagtataaggtagtgaccctaatcgccttcgaccttaaaggtacttttaacggagtcaataagatcagcctagatacgtcgctataggtaagacggatcccgcttatagccagaaaatggattataagctttataagcgaccggcacgctaatatcgggtttgacgacttccgtacggagactactccgctagtgaactctaggctagcttaaggattactactttccgctatcttatttatattctttaataccgacctcgtagatcagcccgtcgactcctagggaggtatatcggcattcatcgacgattacttccgatagagagtagggggctcagtagaagagaatttgactaagatacaatccgaggatatccctcgtatcgaagagtaggcgcggagaacaggatcctgcttcatagcggagaaacccgaacttatctatctcactagaaaaaggggagaatatatagaaggacgaatcatctttaataggaccgacgtcaagccatcgcctacagctaaattactaggctatcaagcgcgccaccaaaacggcaatcgctttaagtggactacgacacttgcgcccagagcagatgcgacagctctaccaggcatatatcgcccctatagtagactacgtatcgacgggtaaggaaatattggtaagctatattaagatcatatgacaggctacaagggggaaagtaagcgagagttatgctagtgcggatatccaaggatatccgcattgcggatatggatatcaactcatatccgcagtgcggatgtggatatcaactcatatccaatatccgcaaattgcggatataaggatcgatctgatatccattggagcggatatgccgcagtctaagatagacgaaaacatctttcccagctaggtttagttcctctgtaaagtaagcagaggctattacactataactggcgagtaaagaccaccgttcgctacatatggaaagaataggtggtagcaggcataacatggcaaacgggagaggggaagctagctggcgatctggcaagatcacgagatccaccaagcgattccaagtggttctatgtaatatacggtactgtgacgatgactcattgctgaccatacaaatattacaatgacagttttgccaaaattctgaggcggtgacctcacccggcctagcgcgcgtcgggattggtttctccgaatcaagaagaaagagtctggaggtatagctgatttcgaaaagtactgtatgaaattagtttctggtacgaacctcacaaattaggctgcaacaatctgagagggtatttattcaattacgtaaacatattattttccctctttctatgattttcttacctataaaaaagcatttaatgaaaatgctgagcaatccagtttagtccttttacgaatgaaagaaccctcaatctcgattcttcacgacaagctacgaaatgggccaagttgtccaaaaaagcccagacgaaggtcaattggaacattaacatagcctatgatttgctcaacaagctattatgacagtcgttttggaaaccaaataatattgctcaccggtctatgccatagtattctgtactggtgtgaggagtaattttatcgatgatagctttaggagcggtgatgagccattttcaaaattttacaattgaagcacatgaaaaacctcttgaaggtatcgaaagatcagtcaagtagaattatttttagtcacaaatgaaatgtgccattatgaactaagaaatactacttggcagaactttgacatgggggtcctagttgtagatttaaacactatcgctatgtaatgaagtatgatgatgattgtttgaagctcatgaactgcgcattttgactggccaagttcggtcattgagatactgcgatctgtggaactagtcgatctacttgccgtttctccgcacttatatgagatagcagaggaagcgatagaaaatgcatccgttcagattaaacgatttcaccagccgaacttcttctgttcacggttacagaacaaaattccacgagttagataaacactccttggtgatgatctcagaaaataatgacttttgatccaaagaagcattcgcatgacctactactactccaccacctcagtacaactgcctcggagacaaccctcatccgtcagcccaatctggaaaaatgtaatgaattgctgaagctatctgttcctggtgcttccatatgtattgaagaagtgatgaaagatgccagagaaatcttctaccgaatcgcagtcagccatccaagattcctctcctctattccgtcgccagtatcgccactttccaagcttgaatatggtttgaccacggcccacaatcccttcggtgaagctgggaggcaggcgccagggtgtgtaccattgagagcggcttgacttagcggattgcagggatattcggcctaccgtcatcagcggttgggcattttgtctccggtgcttctatggccaaactcactgcgatgaaagttgcgcgagatcaaattctcaatgttgaagagcgttcgaatggggccgtctatatctcggaacaggctcatttgtgcattcaaaaggccctttgaatcattagcatttcgggccaagaaggcgaaatcaaagttggttgcaagttccgaatggatctctcactactgaagacaaccatcgatgacgacctttaaaatcatcgaaaaccatttctacttatggcaagctgtgatactaccgatactggaagtatgatggcttcaaacgagctcgcatgtacagtgcaatatcggaagatgtggctgcatatagatgttgtgatataaggttggtgcagatcagaaacaaaaaacctctgaactacaacaatagatgcagcccacagtggctcggtcgctttctctgtgactcatcgaccaaagaacaaggaaatctgcttcgcagatagtatcgcctgggatgctcataaatggctatctcaaagccatggctgcggcgccgtcttctttcgtcaccaatctcaatagttggaaagtttggacgtggaacgccaagaagggcttcccaacccctgagactggggcgtggaaaagacccgtccggcacaccatataagactgtggtttacattacacgtgcttggtcttcaaaagatcgatcaagcgattagccatggatttgagctttcagcgcatctagagtgtatgagcagtaccttggttgactgggagatcatctcgccgaggtggcagcctcactatgaagaatataacagcctggcgaagcacatctttataaccatgttgctgagctttcccaaccgcttcaaataagcgatagagtaacgctcgtaggtggcttacgagactgtggaatgcgcctgagagcgtttacagtacagagaaggtgcatagttcagaatctgcgatataagaaattcttcatttatgtaatctttatggagaacattttggccggccggtacaaagggttgattagattaggcatgctaaagaacagcttttagaagatagttgtattttaaatagtactattgtcaaccgagaagcagggattatcatcgataatagtcgaaagataatgggcaggggctgtgcaagcattaaacaatgcgtcgtctattactatttgtgcacttcgaccaaatctgttcgggcactttgggctcttcaattggcccacattgcaagactccattttaaatacgtgcccctgagctgaaaaccccgatccaaaatgattggccaactcaggttaaaaacatgacgcccgagcgtccgcttttgacatgtcatattttcagttggaccagatgcgtaagcatacggacggggttcagactggcagtgcaagtcaggctggtgctactgccaaaccaatacgatcaatttgaattggatcttcgttgatgagacgtattcatgaccacccaagaagaccaaagacttcagaacagcccaggcttcatagggcgttttgactttccgctatcaatttacccaggtgcccaccaggatcttctttatttcgtcgtttccattcaccataattctggtttgtatttgaaaataaccctgtcaagtcacattactgtggacaatccattttctagcgtttccaaaaggcccatgaattgcgagtcggggtacaacgcagcatcaggtccggacatcactggcgcaagacgagagcaaattcgcaatgaccaactgtatactcaccgagagtgtgattgatgagatgaaagaaaaaatgagaaatatctacgcagagctgggcaaagtggagaagagttgcaccgaaaagattgaagatgtctcacagatgaacgaaaacacgatgttatcgcatgatcagtggaataccatcacctcgttacaccaagagctcattgagaaacattacgacttttttgtggtttcacaagatctagcagccatcgcgaccataggaaacctggctgaaaagcacaacatgcccgcccgtatgtggagttacgggatctatcgttacctggaactgctacgaaaacatcgtgctcactcgctcgacgtgcaagaacatttgctaaatttcacacgtctatcatatctgatggtgacacttcttttggagaggatatcgcctttcagggagatctggaccgaatgcctgggcgatctagcgcggtatcgtatggcggtggaggacacagatggagcggatcaaagaacatgggcagaggtatcgagattttggtataaccacgctacagatcagtgtcctgaagctggtaggattcaaaatcacctcgctgtgatctcgcgcccggatacattgcagcaatttttctattacaccaaagcactgataatcgcgcgcccattctcagacgcgtgggcaagcatgaaacagctggtccattctattcctggggcaccgggtgataggaacatcttggtcaattcttttatggctgctcatggtgcccgtatcttggacttgccagttgagcagttcgctcttcggtcgaggatcttccttacgaatctgcgccaagacgtcggccgtttaggtcaagaagcacaacaaggcatctttgttacatgctgtaacatcggtgcaatacttcaatatggcaacaaagatggtttcattgccacggagttcaattcaaccgacaatactacgcttggagatgcctatgctctcgcaaaacagtgggcgtctaaagcacacgtcgacccaaacagccatgtcagtaccgatttatcatctcaatacgcattcagtgcaagctcattcgcttttcatactttggccatcatcctcaaccagcctgatgactggaacttgcagcctgctgtgcatgtctctatggccttcctgtggtgccttacgctccacccagcagtcatccagcgacttgagcggctggtcccatggtcgatacttgccaactacctgaacagtctgtttcagcccaacgtcaatatttcaacgatcaaaggcaaatcattcccccgcattgatggcaccaccccacagcagctgccggaggaccttttaattagaggccacacttggagccgactttactaccctgccatgtttttcgacgcgacagccatggcagaggacaggccattgattgaggatccttccacaatgctccttagagtacacaggtgcctgtggcttggaatgcagatcgcatcggtctgcctcacccgaattcactataatgtactctggtctaacctagttctgatttagtattctcgttggatgaagtacgacgatattttacggttcacgcctaccagacttgcatacgaatttgcgccaatctctcaatccctagaccacctcagtgggagtctctactcgacacctaggctcatggattaggaaatgagggaagctttgaaaaacccacaaggtgaccatcatctctcttggtcggaagatagggaccacaatatcaactatgtatagtgagtaaaatcgaaacagtagtcgaagatttctcttttgcggatcagaaagcgcatcgcaacctgtgttttcataaatgtaaacgcaagttgacacagacaaattgtataaatgcggcagactcggctttgagtcccacgtctggctggtagctctgagttatttcatagttgagccgtcgagaaagatcgctcctgggcgcgggttgagagatgaggacatttgcaggccaatgttactatgtagctttttcattagcctcactaggcgcaaatgcagcatcggaagaacgaaagtctggaagcgctgagagaaaaatctcttgacagaaaccaatgatcaaaattctacagttactagtggtagtatcaagccaactacctgactaccttgacgctacgaggtcgaaacttcaacacaaaacctttctagccttgcatcaacgtttttttcttggtcaactgctaagatcttgaaacacgagacactgattctctaagatgaacgaccaaccagaagtgaagtcccaatcgcccccaacactatacttcgcacaactgtgccaagactcctgtctcatccccgaggtttcaatagtgatgctagagggttcatcaattttgcacattgcgacgttagcgcttttgcttactgcgccagtccttcagttctctgtcgtcataaagagagataggcatatgagcagctagaccctagagtctagaagaatagtaagcgttgcaccttcttctataagaacaatcaaactaccaagaagcatgcacttcgagtacacccccggacctcggtttgacggtggtggagaaacggcaggcttctcaacacctgttgtatcgtacgcacctgaggcatgtcacaaagcaacaacgtatacagttttgaagatacattctccgatcaagggacacaaagtcctacctgtggagcgacgagtgatatcttattgggcaatcacttacttgttaattagcaactcatccgcatattacctgtagtcgagtagggtgcacttactcttcttggccagccactactatcttgtggatacacattgtggagatcatatggcccgcaagacagccacatggacatatttatgacctctctgaagcgagtatcagaatgacaaaatcaggggctccaatattcaggtctagaatgtatgcacgggctacttgggctacttgggctacctgggctacttggccatcgatcgtataccgtattctaatattcattcattatggatggggatcgggcgtgtagagtgatatatagccccgtcgaataatgtgtggctacatcaaggcgggacccagacggtagtgatcaacgctgagatgctatagttgatcaccactgttacttcgaccgccgctgccgaggggtccaagctagccggagcttagaggcctacttaaggcatgaacacttgtgagcaagctcattctccaaaattttctttcattttcattcatacattcatatggcttcattctgcatatactggtagatgatacatccaattctcatcgactctggttttcacacaatttgcaattgtttccatctgaaaaatgacaaacttcactgaccgcgcatctgatgaacgcggtactcggaccttaatactcctgtggatcacagcaggtatcgcacttgttgttatagctttacggatttccagaggggtcaaagaaagatatatctacgtggaggatgttaccatcctagcatctgcagtgagtgctccgctcatgtaatttgcagcataagatatctgacctcaaatacaagattgcggcaatagtttactgtgctaaaatcacaaatatcattaacgcaggatatggacggcacaaaattctactgggccaggaagaatacggaaatgcaaattccgaaatgatgtactctcttgtctggggaaacatctcgacagccgtctgcaaaatctcggcggcaatattactacaccgggcggtagagatcacaactttcagagtatgttcaatactgctgacggcattcggatcggtggtatcacttgcttggatcgtgctgttagaaacgacctgcatcccttctcgactgttaccaaagataggagtggctggtggaggtgggtactatctaatattttctatcagcaggatttgttcaactgatggattgcagtgctatcaattctactctatgttcaccttgcaggtaatgcgaccattgtcgtatggacgcgggatgctcctctccaaaaaaggctgattggttgtgctttttgtgggtcgattgccctgtaagttgaatcaagttgttatgtttttaggatgaagaatagaattaacgtgaattgtgatagagctgtaccagtggttattatcaaatgcacgaatctcaaggctctcgctgttgggcatgacatgacatgtgagctttccctttggggagagggggtcttgaaaccgacctatgtccaatccattttctgaggggaaagagctgatgattgattagatacgatggccccattgctaatatggataaagtgagatcattcgtctgatctagtgaagcacagctaacacttgccggttagcttggaattctgcgtcttttctatcgtttcaagcctggggcctcttcgtatgacctttttcaaggcgaatgagcccgaaggcaacactacaaaaagtatcaatacagtgagtaagtgcttctttcctcagctggtcaaagactcacagacttttgtggtaccactatagtaaggctttgagttgatcccaggcgctcggcaatactatcaaatcacaactcggggggaaggcatggactggagcctattcacatttttcatgacttgttggctactctatttggtttgatgtaaaacgaggttggttcatctcccagtgagggaacagcataccgcatccctccacgtatcagcgcatcttttataagataacgatttttgaagccatcgttgatcaaatctagcacattgtctcagcggttaaacgagcacataattctgtatgcggcatccacaaagtgatctattatcttggcaacagatcgcggaactgtctggatattgagcgatgtgttgctctctatcaaaggccgtgaagcggagagtcatggagtggaaggcatataatgagacgccttctgaatgaagaacatgtattttccaagttttctatctcattcaggaacgattctttctatataaaacactaatatatagctttctatagcaccattatattcaatcctataggattgtgcacgccctcaaagcccatacgcattcgctccaatctatgcccaattcacctaatgcccggctgctgtctttcggatatgccaatttgcaggttgcaaaatattttggatcctttacgaatgatgaccgagctcagattcacatcctgtctaatacaaataaccgccaacccagaaatgttcaaaattcaataagagtggttggtagagctccgcatcaaccgcggttatgaccgctgcggtgcgtttaggtaaccgcgaaaacgcggttgaggtttgggattttcctatatgcggtcgctcaggccacatccagaaaccgcacatggtcaacagcgggtagaccgcggttgggcaaacgggccaaacagccaagaccccatgaattatacatattttatgcagaccacgacacttggatagtataaaagctgataaacatgtaatcctagatctggattctttatgaactcaagataactgagcttttcagcaattttgtgcgcctgacgatagcttaattaggctagttatgtatttgcggtctctctgcggttgaccgcagtctgaccatgcgtttttttagtgcggtacggtgggaattttgcttaaccatagttagcgcggttggggggtgcggttgggctttgccttcccatgcactggttgtgacgaggtccatggtggtgtgacagttcagggactgggagcagaagaggtcgacattggaagaaaaaactgggtaaattggcctgaggccttttaagtcgtagaggaagatggggatctcagccttctcccaaacttctttcctttccttctcatcttgctttcttcgtatcgaacgacccagaattcaactgaatttattggaaattgcctcatcacaagtgggcaaaatttccaaatgggtaataccctttcctatcgcacgatcacaggtaatctttaattgtcaaacacattacgcttttctccgagggcagcgctatttcgtttttgagtataaacataactcaaaatggacttattaggaagatgggccaggtcgggttttcttcattggattttgggtaataccatctgattcgaaaaggcggctacaggaggaaccgcttggtcaaagtcatgtaatcaagcagcagattgatgtatcgaatgtctccgcgatggcctgccatccataggcttgaacgcggttttccgccgacccagtgcactggaaaattcgttctctgcgcaagcaatgattctatcacgtcagaattttcgaagtttgacggcgtcggccagaacagcggtaagtttcttttggtctccgacgtgcatataatagtgacttcagaatttctaaaagaggctctgattctccctccagggggattttttttccaccagacgggggaaaggtttcaatgtttccaagcaagtctcgcttcgcttttttaacctcctgaaaccatatagttgtcgctgaatattggattcgacaaaattaagacttcattctccagtggcctttcaactgactgagtccggtgggtgtactcatccacgatcgcctgggttaccaacatatagggtaggacatcacggattatcaattaactataccacaaactcaacccgtgaatatcttcctaatgatacattgtgatcaaaatatgtctggtttcctcataagctgcgacgacctttttattcccaaggggccgattgaatttatggtcaaaagttgcatatagaagcaagctaacggcacgaaaaggtttcaataatcaatgcgagtggcaatagccacggccagaggggtcacattcgtttgagttgacgatttgcccaatgaccctcaattatcatcaatttgatgtcggccaaccactttgccaacgttgtcatgctcggcagaacttgttgctttttgtatccagctccgaggctatgtggttgaaaagcaaggccaacaaaacaagaactagcagtcatccacctcgttccatagcagggcgttagtggagttcagccagcatgatcaagaacaataagtctagtaaatgctggtctttcatcaaacagccaagcttgaaattggtttctagctatggactttcgaaccctagaagtaagaagcggaatgagctaggacggaaagagctggtggccgctggaattcagaaaatacttcgctagaactcctgcgcgaaaatccggggtaacaatttaactgtgccgattgatcagccctatgtctccaccgggctggcgggtagttctgtgtaagacccacgactgctgctacaaccgctaaaatatatcccggcatctgctcgaggaacaccgccgacaaccccacagcaggttgatgttgaagcgcgtaacttcttctaaacaggtagccaggtgcacatatgaagtcttccaacgcccagatgccgtagttctcgaggaggtcgaggaagaattgggcgtccgttttgaccgaatcaactccgacggtgttgaggtaactatagaattcctcgtagaatcgctggatatcatcgggatctatggcaagaatcttgccctcgggaatattttgtgcaattgggccattggagctgggatctttgacttgtacttccttggtcttgtactttcgagcgaggtcgccatcaggactgattccaccccaatacccgaacaaggcatgccaaactgccacatgctgaatattagggtttttctggcggatttcgtcaacggttcgtttaagacctcctgggaaggctttttcgtttgcctcgaaccgctgccaccgtcttctgaattgggactcgccttcgttgtcgagactctgccagttgtcgtcgataatcagattcgagatgctgatgccgtgagacttcaaagattccaaggattggagaagtttttcctccgttagatcctgccccaggctattccaagtacaaaatgtcaagtcatcaaaccactcagccagccattgtattttcgggtctttctcaacaaagacaatatcatcatcgagaggagatatcggagacgtctcttcccaatcatccattgaagagtctgagaatggcttgaccaccttccgcgactcatagattaaagcagacatagcgacttcaaagtcttccgcaacagcagccaagacattgaattgggcggatttcgtgttatcgttcctggccttgatcacgacctcgccattatcgccagactgaaaaaccgtcaagacatcgttgatacctgaaatggctagcaaaacgagattcagaccatctttgcgcaggaaagagcatagtatcgcatcttccgtcaaatcaaaccagtctctaccatgtcgtggccccagccacggactccaaacccgcaccaaggaaaagttcctcattattgaagaaggggtaccgagaagaagagtactgattccggatgctccatttgctgctgcagacacatttcctgatattgaccatagtagagaaccgggggcctcgctggtccgtgactcgacttggatatcttgcgaaaggttggtgatatattttgcgagctcttctttccgaacctgagaggggaaataaggtgatagcgctttcttgattccggattcgcgggcagtgtatacgatttccccatcaccgaccgaatgatgagggtttacccattgccaatcggtttcggggcttgtgcgaaagcgcaccgtgaattgtgcatgcccaccgactgaagggagttgaatctgtcctgcgaatatgtggcgataatacctatattctgtggcgtttccactaagcaaaggcgcggctgactgtttggtttcgtgcagtggcagcgccgtccagtctggatcggagatgttatgccagatttgagcttcccagggttgatctggtagagatgtgcttgattcgatggtgacggtgaagcgcacctagtccagcctttaatactcgatctttgtttattgtattattgtacccaagacagctgattagtactcaccgtatcgccatggtccttctccgaccgcaacttcttttggactctgggaatgctggttacttgacccagtggagggtagcacgtcacacgggcgaaaagaaccatctggaccgggcgagcaaagtgcgggctctgatgtttcgtagaatcgccaggtccgattatggggagattggaggtatttctgtcaatttgctcatgcatgatcggatgggaggggtaagctcccagctctctcgggtgcagggattagattaagctgtagctagccgattagcgagcgtcgagttgagaaatcgaccaggccggacccgatagctgtgaactttggacgaatgacaaaagatgaagagggagagggcccggggatcttgtgatgtgctgagggaagcagcggggaaccttcctcaacgtctttgactcttcggcttctgtgcgctacactgcatcctatctactatctaccttacgatgttcgatcttctttgttccatgcacggagatggagtatctgtagcattgcttttgtagctgagtattccttttgcacttcctacttgatttctagtgaatcctgacagccaccttgccaaagtgcttttgagcccactatttcccagttagtacagatatccttttacacccaggagggaacagttcacttcacttaccatgtgttcatacgcatcccgggtttcagccagagaaaagaccttatggtccacaacagggtgaatatcattggcttcgatcgcgcgaatcatatcccgcatcagcgccttgctcccaacataaacaccgcgaaccgtgcagatgttgctcagagtatctagaacgctaggctgatcagcaggactgacaccacccaagaatccaatcacactgatcactccctcgaatttgatggccttgaagctttgcttcagggtgccacttccaccgacttcgatgatgtggtccacgccggcaccatccggggtcaacgcgcgagcagtctcgccccagttcgggtcggtcctatagttgattatgtgatccgcacccagttgcttgagtttcttagctttctcgtcggatgaggtcgtggcgatcacgatcgcacccgcagctttggcaaactaaccctcacggatattgattagccaagctgctctttgataactggccgttagctaccatgggcgaagcaatcacttacctgaagagcgaagatgctcacaccgccagttccctggactagaacgacctggccaggcttcaacggccttaggtcgtacagcgcattccagcttgtcagagccgcgcatgtcagagtactattctcaactggtgagaggttcttcgcagccttgacaagacccttctcggcgaaagcgccgtattcgcgaatggtgccgtcgattacgccgcctagtccggtctgtgtcgcgggaatatcgatcgggccatattggtgaccctggttgaagagcgtcgcaactttgtcgcccttcttgaactcggtgaccttggagccgacctcaatgacctcgccagcgccgtcggagcccgggaccacagggaaaccagaagggaagggatatttaccctgtgttgtggtgtggtgcaattagttaactgtcaaactgggttgctctatcgtgctggtattcttaccaagggaatgattaagtctcggtagttgagcgaggcagcctgaagcttgaccagcacctctgattcaccgatagttgggaggggcgcgtccttgaaggcaaggccgtcgaagccattgtccttgttctcgactacccattgcttcatggttgaggggaccattgttttgtacgacaattcaattgtaatttggttggattttggagagagagaggatgtgtagagaaattggcagttgcgatgagttgaggtgggactcggaggggcatatgaggtcttctataaatgcccgcgaattgacgtgggcgatctaccgattattacgtcgaagatagggagtacaggtggtctaggctgttctcgggcagatgagagaccgttctcggacacatttcaatgctgatcaatcccggttcatcctgaccataaccatccatggcttatcctaggctcatgacgtcaggagtatggcgttatgacaatgatacattgttagaaaaaggagagaaggtgatctagaagagcctctatgttatttagtactaaatgatatggcaattttaatatgtaaaatctattccaatcaaattacacgcccgtcatgtccactcttccccagttggatgtttttatctactctgtgttgaaaatagatattaacctgtcaccgctggaaccattcgccttttcttctcggcgttcgggttttgaaaactttaaattagttctttattctccaaatatagcgcaattggactaacctgtgcggaacatcaaaacgtaagttactccggagcttttgcttttcgttgttacttcggcggagcggagcttcgggatctgaaaacatggacccactgggaattctcttggtcctgcggttattgcaagttgcagaatgagaaaatgacggcagtcagcatggaatttgtatcaataaattaataaactataaagctatcggagagatatttcaagtttacaagatagctctgatcaagtacagttccgtagacattctatgctagcctcgcacttaaactatcccatggattaacgatgatccgcttatcgcgacaatctcggagctggcctgatcgccggccatttttggtctccgcgactcattcctccaattttccactggaacgccctccctccttacccatttcacatcaatcggtcccatgcgacctcggtcaacgcctcttgttcgcgcgacttgtcgcaacgcgcccctacctcgaaccgcgtcatgcggagcacgtagcttcgccgcagcatcgcaaacaaatccgctccgttgcgagacccgtcgcccggctctgttttttcaacaatcccagtgtacaccgcagcagaagaggctaatcacgcaacaatggctgaagcgcgttcaggatggcaaagatgagtgggctcggcatgcggaggagattaacgagggcaagaggaagagcttcgcggctcatctggaagaacgcgggttgattcatgatgttgttgggtatgttgtgagctggaatttattcggggtcctcttctgcatgagttaattgggaaacaagtactaattgtccatttctgatctttccagagaacgcgatttgcttcatcaggtgttcaccgagaagagggtcggtatctacgtcggaattgaccctacggcgccatctatgcacgtgggacatatgttgccgtttatggtcctggcttggggatatgtttggggcttgcctgtcacctttttggtgagtttctttgggcctgagagtctcttgaaatggctgactgacacaaaatagttgggtggcgctacatctcgagttggtgaccccacaggtcgactaaagggccgcgaaaaagttcatacctcgattcgcaaggcaaacatggctagcatgcacatgcaattgaagaagctgggcactagcattgagcagtacggcaggagacacggttatcagaaacaggctatctggagacgagcgttggtcaacaataacacttggtggaattcaatgcctttcattgaggtcctgcgcgatctgggcgccttcactaggctgggacctatgcttggccgagacacgtgagtcttatcaatgcaatttggctgttcagttgaactaacaattatattcagtgtcaagaatcggatgaaccagggcgatggcatgtcttttgctgagttctcctaccctcttctccaaggctgggactggtggaacctgttccagaagggtactcaagtgcaagtgggtggatctgatcagtatggaaacatcctgttcggtatggatgccgtcaagtcaattagccgtaacactgccgatgagcaaaaacgtaatcctttggactcggaactggaccgacccattggctttacaacgcctctcttgacagcctcgtctggagagaagttcggaaagtccgctggtaatgcaatttggctcgacaagagcatgactaccactttcgagctttaccaggttagtttactcgttccatgaagcttctgtttcgtctagagctaattattttccagttcttcgtccgcacccctgatgatactgtggagcgctaccttaagttgttcactttcatccccctacctgagattcatagagctcccaagcttgagcgtaggagcgggatgcggactggggggctgtgcggttatccttcttcccaaattctaatcgcgtttataggacatgaatatcggttgcccgacccccgcagtaattgcgcgtagtgtgtcaagaccgtgtgatttgaattgtgaatctctttacgcgaagcctcacccaatcactgggaaggtcagattgtggagtcttcttggcatcccacacgccgtccttcaaatgccatttgaattattatttcacgcacaggtatgcgatttagacatcagtttgctcgggtgctgggaacgtagtatcacggttgttacgactgaatcatttcgtacgatcatcaggtaaatggttctattctggccgttctatgaattctcaagagttggttgatctatgattcaactgctgtaaattcggtggcttggatcttccaatcatcacgaactcggtaattttctccggatagcccaataaagcgcaagtcatgttatggatataacactggttatttccattgccctgaaatattcaatttcgatataggaaatgattgacagagctaagttgttgggtgcgtcttcgaatgtctgctgttgcccggcggccggggcgtcgaaactgttaagagtggatacttcgtattgtaagtgaaagtggcatcgaagttttcctagtgccgatggttcatacaacacctaactagttgattacatctcgctgaatcttaactagttataggaactgctgaatctgcaggacgctcttactcactctagactattttccatgtatttaaaaacacatttcaaatgctgtgcaaatggcctcatgccttgttaaagtactagtacatactgcaacggattcgacacgcattcatggataatagggttttgcatgaatcgtgggcacgtgaagacattacggaaaacacggccccaaatgtgtcatgcttttcaaatcccgaacatgcgccattttctggatagaccaacccccttggcagaatcacaggggtcggacaagagacgggaagtgaccgttttagcgtccgacaacctagggtgaatctagggggtagaatccagagaaatcatttgacatgcgttacacacagtgacacaacaaaagcctgtaacatatctgtcgattcgtaggatatccgtagaagctagtaccgagggaaccaattgtcatgattgagagcgtctcatagcctcaggggctagtattggcatgttacaatatggatattccgaattaacccggtttaccatacaaaaacatattgaatgatggatcgctgaatcagcctgtccttattggtaactaagttatctcagtacctcagccgctccacgtgacaatggtggcggtataccgccttctgtttcgagcgattgttgaatcagcttttttgtggaacgtctgagctcaaactagtatggccccttataatttatcggcaaaatagcggtcaacactaccaaattcatcgggaaccatattctttaatctaccagaacaatcgccacaacggtgatatcgaaaatcgagcgatcacgtcttctagatattgacgagctgaatacgttgatctaatttttttgacgcgaaacggtcgattggggttggtgtgacacggtaaagtattgcttgaaacccccatacaaactttgaacctcgctggtggtacgaaacatgagaataaacactaacaatttaatatatatatatatatcaggcaattctatacggtttcaaaggtcaatacagatcgattacgttgttttgtggttgggatacgcattgtagtcatgcgtccacagaggaaaccgcctcggtactggcagcgcctccggaacaaccgcacccgcgagcaattgtcatctgatattaggcctggggatcataattctgcagcagttcaaggcgatcgggaagcagttctaatgacactggcctgtttggactttggacactgagttcgaaaaagctgacgtggtataacctctcgcattccttccgagcagataaagcaggcacaggatattatcatccgggctgtcagggaaaatcgaccctctcagatgaaggcaatagaggaagcaattgcaactctgtacccctacaacgcgaagcccggtcagcgggaggcacttcatcatcttatataccaccgcaaggatctcatacttattgcgggtactggatttgggaaaagcatcattctgcaagctgtttcggtcctcctccagaagtcaacaacgattgtcatactccctctggaccaaatcggcaacgagcagtcggattacattcgacaaattggtggcataccgtgctttttgaataaagacacaatttgccccaaacttctcaatgaagtacaacatggatgctttacccatgttttggttagcccagaacttgcaattggtgaccaatttcgacctgtggccagtagtccatctttcaaacaacaagtgagcttggtggttgttgatgaggcccatctcgtgcatcattggggtcgaaactttcgggctgcatattctcgtctgaatctgctgcggagttggttgggcagtcaaataccctggtttgcctgctctgctacattggatcccgaaacactggaatcactcaaaagcggtatcagtttcgatccagatgttaaggttcagcggacgtctattgatcgacccgagcttctatttcgaattggctggattccgaagaaagcaggatacaaaccattacggtttctgttcgctgctgatgagaaaaccacggaatcagtataccagagactcagtgagattccaaagacaatcatcttcttcgacagcagaaaggatgcacatactgcagcagaggagtgtcaggcctggctgcaagacatcaagcctgagtggacatatgacaatgtgacgcagtcactgaaaacgttccatcgcaacacagcatctgcgaacaaagacgctattctgactgaatttgggaaggaaggggcccgatctcaggtccgagttatctttgccacagaggctctcgggatgggcgtagaccttcgagacattcgtcggaccgttcaatggggcgtccctataggagaacatgctgctactcagctgcaacgaggcggtcgagcgagccgagataagctggatggtgagatgatcatgctacttcctgaatgggtttccggcgagcgttcctctgggccgaaacaaaggaggagtcagaagcaaggccaagggcctcctgttattgatgcaatcgacactggattaaaacctgaagaagaggcccggaaagcaaagaaattgactgataaacaacgtcgtgatcacatatccgacttctggtataacctagcgaattccgaacgcaaggaccctccaatgtgcatccgtcgccaatttctggatttctttgatgagcgaaacgaatatcagtcagggagacgccccaaccgctgttgcagtaactgcaacccccacaatcgactcggaaagctggatggcttctatcaatatcacgaactcggccctcaggcaaatcaacgaacaagacgagtatctgaagctctttctaaatgggctgaagagcaggcctgtttgttatataaggactgtgcattcttaccagaatccgcgcttttcctatcgccagacttgcgagataagcttgcaaagaatgcacattcggttctcgacatagagagtttacggatgctcatgggtccatggtattggagaaaatcgcacgaacaggcccttttcgatatcatctggacttcatatcgtcaagcaaacgccaagactccaagtactcaggccagtcggtcacagactcccgggttgagcagccagtctacacttattgcctgctcatttgacttatcaacgccgtctacatcatcacaggactccggcccgaggaactatcaagttgttggtttgtctccgctttctacaccattgccatgggattcgccaatgcaatcgcaggattcctgccccaatttattgagcaaggaaaccgtcaatgcatcaccactatctcgacctgtgaccttaaagcgatcagctcttgaaccaatatccggcaatatacgagggaagaaaatgtatactcggaacacctgactccacctgagccggcagtgagagtctgattcgaggttcggcagtaggaagtgggtgatatctatggattagaaacagctctttttagtacacatccagagtgatgggataaacatcacccatcaactatatcagatcatcaacgttgccatattcgacttatcctcttcaggttcctttgtaacgtaatcatccaagaccccgatggaggtcgaggctaggcctgaactatcgtcaagttcatcacctgtccattgcccatgaaccaccagcttgttgaatcgtatgaccccattgacaatcagcgcacaacctcgggatacaatatctggtggttgaaatggagaatctctgccatccttgcgctcatcaatagaacctgaactgtatatctgaaaggctaggtttcgcacatcatcgctcacatcctttgctgtatgtgtgctgttggtatgttcaccaaaggcctgttcaatggactccttcaggtccgtacagtaactagctgttaaagcagtggtccgaaataacgtagcaacatcaatgctcgatgtgcgccgagtggccataagagtcttcatttgtagattgaagaattcattcagacggtccatctcgaaccaactatcctcggctccgcggaggttgacaagcccatttgccaaaatagcatgttgcaattcttgatcggcagcaggagtctgtgttatccatgtcatataaagagacaagaaggcatatttggacttattactgccatggaaaagaagacaacaccgagcaaaagcccggcgtattatgcctatgtcagcccgcttaatggcaagcttaagagtcttgtagatttccatttgttgaaggaactttgcgtgggctgagtattcaacgtcaactggggcaccttgaggctggggtttgtttcgatttgcagaacttgactgctccgtggatgctctgggtggtttcgggacagatttgtattgcttgtcaaaagcaaacatagattctcgtatcttctcaattgtgttaaggaactcggcccggcccgattgacgaatatagaggtcaacttcttgatgatattgtcgtttgacacctggaggaaggaactggtagtatagagcagtcactcgggcgttaaaagcatggattgcaacctctaccttgtgatgaaatggacttttatggccctggacgcagccatgaagttcttattgtggtgtaacgtacaaccgatagaagcactctcaagaccggaatagagatcatgaatcatatccatgtaattggtacgccaatgaaaaaggccggggatgggtaaaatccagtcatgcttgtcatatgagagtgtagacccccggcgttctttctggacggcccggatcaacgaaatggttttttgatccccaaacaccagatgcaagatgtcattgaaatcactagacggatcgtacccaagttgatctgtaaagaccttgtcgatcacattgtaagtgccatctatagtgccttcattctcaagaattggtccgagactgtagtgcatcgtcttctgaggtaacaggcgttcaacacatgggaattgcggccactcaacaagctcatcggtaaagacatcatggatagcatcacgatgtgtatagcgaatagcttcagcaatccaatatcgttgtgtctgatgaagtatctcatcatcccggttaccgggcattaaacagacgtcgtttgggtccaatgagagatgtggatgaaacatagacttgcgtagaccaccacctggcatattatgactgatacgcagcttgcctgttgttgcacatatgtgttgcgctgggttccgaagactctgatgccgaacagtctcactgtaattgtcaccttttagcggcagaccttcggtgcctgaaacctaaggttgaaccacacccccccggggnnnnnnnnnnnnnnnnnnnnnnnnnnnnnnnnnnnnnnnnnnnnnnnnnnnnnnnnnnnnnnnnnnnnnnnnnnnnnnnnnnnnnnnnnnnnnnnnnnnnnnnnnnnnnnnnnnnnnnnnnnnnnnnnnnnnnnnnnnnnnnnnnnnnnnnnnnnnnnnnnnnnnnnnnnnnnnnnnnnnnnnnnnnnnnnnnnnnnnnnnnnnnnnnnnnnnnnnnnnnnnnnnnnnnnnnnnnnnnnnnnnnnnnnnnnnnnnnnnnnnnnnnnnnnnnnnnnnnnnnnnnnnnnnnnnnnnnnnnnnnnnnnnnnnnnnnnnnnnnnnnnnnnnnnnnnnnnnnnnnnnnnnnnnnnnnnnnnnnnnnnnnnnnnnnnnnnnnnnnnnnnnnnnnnnnnnnnnnnnnnnnnnnnnnnnnnnnnnnnnnnnnnnnnnnnnnnnnnnnnnnnnnnnntccggcggtcaacggagtttgcttgtcaacgaagcttttttttattttttaggtattttaacccacaacgccaaatatataaacaattaactataatcctcttctaggttaggcaataacggagggtgttcgacctcgaaattgtctaatcttgcgcgagaagcatcgctcatggccgcataaggtagtggattgcgtaactccgtaagcgcttccttgatctcttctgccttttttcggtcacgaatgtggcgatttgcatctttagtggatagggcaccaaatttgcctatttgcttttgcgacttgcgtgcaattttgcgttgtttaggcaatctattctctagggtatcctgtagtaggcctttatcctccgcaagctgaatctgggattgggcaacacgaagcaattggtcacgtatatcagccggaagaggtgatttatcaagtatattgaccattttattgcgtgttcgacgtgcatcccatacagatttaggtggtgtataagggatactagatatttgctctggtggtggtgtaccatcaaatatcttgagatccggctcaggggtttgtgcagccaccaaaggctcaataactagcttaggattgtaaggatagataccacgtgtagcaaatgccttccgaatagtacgtggtgtcattgctgttgcacgaattgcggttatttcagtaaaaaagaccgatatatcgcgggcatcaccaccccattgagcaatctcgttatttttagttcgatacgcttgtttcagcgctcgaaaaggagacccatcaagtggttgaataaggtgggttgtatgaggcgggcagacgtatggaataatattgtagaagtcacaaatatccaaaaattcgtaggtgagatgactgccatgtccatccatgatcaataggcggggctcttttgtactttttcctaggcgatggctcgtattttcggcaaagaagtgcagccaatcgattgccagtagatcattcgaatatccagaatccgaaacagcgattcgtgtctcctcagagagctttccaccatcataccatctgactagatgggccttccccggagcaacaaaatatggctccataacccaaccatcggctgcaacgcattcaattccggtaaccaattggcctctttcaaatgaatgggttctggtacggtgcttattggctgaaataacgttttgaggcctgccctggccaagcagaaagccagtttcgtcaaaattgtatatatttttggtcggaatgcgcttgataaatggctctaaacggtcataccatgccgttaaaacaccaatatcctcagcaaggatacgcttttgatccgcaggcttctgttgcacccaaaaaaggtcttccggtaggtgttgagccacaaaatcgtacacccaatcttttgcaagtggacgtgcgtctgaattggccctgcgtagtaatgcatttgccgatatagccaccattttagccgtaggtggtacatgtaggttatcaaggcacctaatccagcgtaccaatgaggctatttgatcctcatttaggcgggtgtaggtcatttgacgagtactacgagactttcgaccggcaaagcgtgcccgcaatcggccaacgggaacctcatattcacgcgccaatgcagcgaagttaggctttttggaggttctagcaactgagcaagcagtcaaaatacgccgttcaacatctgaatagggtttatccatggtggtggtagttgtaggtagtaaaataggagcaaaagctttgttgacaagcgaactccgttgaccgccggttgacccgcgcccccnnnnnnnnnnnnnnnnnnnnnnnnnnnnnnnnnnnnnnnnnnnnnnnnnnnnnnnnnnnnnnnnnnnnnnnnnnnnnnnnnnnnnnnnnnnnnnnnnnnnnnnnnnnnnnnnnnnnnnnnnnnnnnnnnnnnnnnnnnnnnnnnnnnnnnnnnnnnnnnnnnnnnnnnnnnnnnnnnnnnnnnnnnnnnnnnnnnnnnnnnnnnnnnnnnnnnnnnnnnnnnnnnnnnnnngtttttgtttcaaccttaggtttcaggcaccgaaggtctgccgctaaaaggtgacaattatctctaattacacattctgtaaatcaatgtatttaacgactctcataagtatttatattcaatagggaaactaaagactactgcccgagacctaaatagcacctcctctaaacaactaaacaaagataatttgaaaacattatgtcgcttttcgtgaccgggagcgtgggaatcggttcgtatgtgaatattgaaaggttttggtggcataatcgtaacttgtccgccatgtctgaatgtgcgtctgggcagacccggaatttttcggaattggttggatagttcatgcgcgttttcgcgggcgtgatgttgagtatcgcggtggtcaaagcttatcgcgggactagcgatggacatttaaatagatggggctcccacctttgatagtaacctcaacaagaacattacaactacctatctcaacaggttatgagcccggatggcttcacctttgggcactcaagaatctaaacagcaacaatactttgcctgccattacagctaagcttctctatcagagactaactctatgagcttcagaaactgatcatatattctcagtaacttgatgaacaatatgaagtcctattgctcaaaccctctgggagcaataacgcgtttggactttccttcaccaaagaattacagacatcatgccatcattgctactgttacactgtcacactggcacggagtatcgcagggttgccccatagccggcgcatgtcaccgtttgcagcaagcttcaaacgttcctctgccaaatgatcataggtattacaccattattgctacggttacactatcgcactggcacggggtaccttcgagttgtacctacagctgggacatgtcaccatttccagcaaactcagaaactatcttcttggggccactgaccacagggccacctcaattccggaataaaaatgcggggaaaattacaaaagagacacttcgcgtcgtacctccgacacactcgccactggcgcttcaaacaaatccaaacgtcatacttcccatcactttctccgagcgcactcttgggagcctactggcgcctgtccactgaagaccgcatacgccgagcatcgaggaccaccatcccaatcaccgctcctcgcaacactgtgaaagacttcccaagtgcccccaaagctcaacctgcgcgttccagtatcgagcaagggacaagtcgctacagttgctccgcctctggcactctcacccggtcagaaaacaccattgagagtttggtcttggccccaccaagccctgcgggtggaggagagccattcatttccaataacagcaactcgagtcgttacaacctccggccaaacagaccctcaagcttccctccaaggaagccgggatatctagttgaccgacaccgtttccctcacttctctagatcgtataagtactctctcgatctacacaggttgtcagacagcgactatactcctccatctcagacgcctacgccaagttcatcagaccgaagcgtttccattgtttcaagccttcccagtaccgcgtcaagccttgaactcttcggcttggaggtgcgctctcttcagtcatcagatcgtgaatcggttacctctgatcggcccaacgacgtatctagccctgacttcttcagctccgaggagcatccattgccaacatgactgaaatcacaaaattcgagcaatttggaatcaatacgttttataatggaatcccgatactggataatgccagcgactggtttcggtggaatcagaaggtcaatgagttcattcggatatctgccgttgccgacgatggggcgactccaccgatagaagaagaagaagcacggcaatggattcaccgccaaaagttctattctgcgatgatcacggcaaagctgacacacaatgcggcgcaaaggatcaatgcctttgagattcctcgagttcaagtactgcttaaggcagtcaaggacaacttcaaaccagaaggctccggcacgtatgttactctccaacagcgatacatggcccttacaagagacaagtgtgggagcactcaagccctcggagccgagatcaggaagatccatgctgaaaaactcctccttgaccctgattgtgtaacctccgaaattgagcgaacatttttctttgtgcatgcactcggtccggagtacgagagcttccgcgatcatatcttccgacaaatggaccttgtcaatgaaagggacgcaaacgggaatgttacgaaagcggcgcccacgttcgactatatcgagaataaagcaattgaggaagaacataggaagggacagttgggcaaacaaacaacggagacgcaagcacttcctgctcttgccctggtccgtgggccaggtgacaagaagctcatcccgtcgtcggacggaactacttgtcgaatcgagatcgataacgtcccatattgctccttctgccgaaaaccttatcacgttgactccgaatgtttcaccaagaatccgaaactgaaacagaaagacggagatggaccgaagccaaagacaggcagaatacacacaggcgcacgcaaacagtcgaagaggcgaccttcgacggatgacgaggatgacgatgcgggtggcccaaaggatccgaagaaaccaactttcatggcgacgaaagtatccgagaaagatgtcaacgaagcatttggaaacgatatcgagggcaatttcgccatgctcgaccatattcccataatgatggcgataaagaccctctctacccgcgacgcgtggatcatggatagcggatgcgctcagcacgtctgcaatagtgcctcgaagtttgtccaaatggccaagtatcatggcccctcactaagaggcgttgacacctcaacggctccctcgggagtgggaacagtgaatatcctgtgcaatgtacgcggcagaaagaaatggcttgtgcttgataacgtcctctatgttccatctgcacacgccaatctcatatcggtgctccagcttctcaaacgaggggcaaaagtcgaattctcaagccgggatgctatccttcgcaacaagtcaaatggaaagaacctgtttactgccagcgaatatcatggagtctacgcacttgatctgtgggcaagtctgactttcccctcttaccatgttagcccgcaaatgtctctgtggcataatcggcttgctcatatgagtgatgcgaatcttcggcggatcaaaaagcaggctcacggtgttcgggacatggagccacttcatccatgtaattcgtgcctgcaggggcgaatgatcgaaaaaccccaccgcagatcaggaagtagcaggagaggagaatacgcaatggagctcctccatattgacgtcgcagggccatttgacgagggccttgacggcagtcgttactggctcaccatcgttgacgacttcacgagctagatcgagattatccctataccacgaagacaagagttcgtcatagaatcactgcggttcttcctcgaccacaacgagcgccccgagcgaaaatgcaagcgaatacgtctcgaccggatatctgaacaaatgggagacgagatgaagttcatgttgttctcgcgcgcaattcaagctgaggtgacaggcgtggatcaacatcagcagaatggggttgccgaaagagcccgtaagactatctatgaccgcattggacctactctagcacatgcaaggttgccgtctaagttctggccggaaattgctcgaaccgcagcgttcctctcaaatcggtcgccgtcatcgaaactcaacatgactccgtaccaagcgtggtacggcgacagacctgacctctcaagacttagagtgatcggatcaaagggggaatacttgatcccgccaaagcagagaaagaagctcacggatccgcgaacaagaccatgcattttgctgggttatgagggaaatacctactaccgtatcctactgggagacggaagaatcgttggaactccaaacgctgaatttcaagaagtccttacaactccctccacacagactatggaagatgtgggagccagacaagacggcttacttgaggcaacggctgctgccgcaggagggagtgagacggtgggactaataaaccaaccgtcggtaggtatacggcaagcatccgtgcctgcttcggggtaccaattgtcgatggatcccccagagcggcccctacctaagccgagaaacgatatctcgcacacactgcctcggagtgacgagaactcgcgagtgcttacccagccgagtgacgataactcgcaaactcaagcgtcggcccaatcgagtgacgatgactcgcagccagctgttgctgtacagggagacaggaccttgtcgtccacacggagtgacgataccctcggacctctatcacctgcctatcaggattctgtccttgggactgacttaccgtccggtggcgaccagcaacagggcgacgcggttgctgcacagggagacataaccttatcgtccacacggagagggaacaccctcgggccactatcacctgattatcaggattctgtccttgggattgattcaccatccggtggcgaccagcaacaccaacgagggccaatcttagaatggcaacgatattcagagctccatcggccagtccatgaagttcaacaaggaacattagattaccaccctgaactaaaacttcgggcttcggaagccacattggacaatcctgatggggacgaagagcttgcgctcatgaacgtacctgaagagaacgtcattccaaccttcttggccatggctgcaaaggagacggaaccattcgaacccaaaagtctgagccaagcaaaaaaaaaaaaacgacgcaagctggatggattgggaaagagccatgcttgaggaagtgaattcactccaccaaaatcaaacgtgggagcttgtggatcctcccaaagatcggcggttgctcagcggtaaatgggtcttcaaactcaagcgcgggccgcatggcgaaatcatccgccacaaaagccgatgggtagtgagaggattcacacaagaagaagggattgactatgaagaaactttcgcatcggttgtcaagccaatgagctacaaggctctcttcgccatcggagcggccctggatttggagattgaacaaatggatgtcaaaaccgcattcttgtacggaaatatcgaccacgagatctacgtcgaacagccccaccatatgacggacggcacgccaagggtctgcaagcttcgaaaggccctctatggcttgaagcaggcccctcggatctggtaccagactctgacaaacttccttcgcagccttggcttcgagccaatcaccgccgatctcggtatcttcgtccggagcagtgtgtacatcgcaatatacgttgatgatctcctgatcgtgggtccgagcatcgctgagatcaagaggatcaagcggagcctgagaaaccggtttcagatgacggacctgggcccatgcagctactatctcggggtgtccatccagcgagaccgtcaaaacaggagactgctcctaagccaagaggcatacattgacaatatcgctcatcaatttggaattgacaactgcgctcccgtcagtacgccgatcgaaacctcaccacttccggaaaatagtccagactacacctgctctccagatcaaaggacctcttaccaacgcattgtcggatcactgatgtatatcatgcttggaaccaggggggacatcgcgtatgcggtctctgtcgctagcagatctctctcaaaccctgggccccagcacatgaaactggcccgtcgcatcctgcggtacctcaaaggaacaaagaacctcagactcacctaccaaggtcagcttcagacactgagaggcttcacagatgcggattggggagggtgtcgcgccacgagacgatccacagcgggctatctcttcaaaattggaagcggggcaatcagttggcaatcgaaacgccagggcgttgttgccctttcaacctgcgaagccgagtttctagggcaaacgcaagccaccaaagaagcagtctggctgagaagacttctcaatgaattgaatatggatcaaggaacaaccgccacgatcatctgcggtgataaccaaggtgccatcgcacttgcttcaaatccacaataccactcccgcacaaaacatatggaaatccaacgcaagtggcagggagaggtccaagacaacggaacagtgaagctcaaatatatcccaaccacagaacaaattgctgatgggttcaccaaaccccttgctcgggaaagatttgagtggtttcggaaagggcttggcatcgagtgattgctacaccttatttatattgaacaagactaaggcgcagggcaccctttccttcctttcttcacaaatgaagttttttgaaggttttaatgggacctgtcgcaaccgcgagcatatggtcgctgacaccattgggaatgggttgtcatcgagtgggagtgttgagtatcgcggtggtcaaagcttatggcgggactagcgatggacatttaaatagatggggctcccacttttgatagtaacctcaacaagaacattacaactacctatctcaacaatccatattcgcggagtgcgaatatgaatatgtcgtttattcgcattcctttattcctttcggagccctagctatcccagcttcagaggtatcagttgagagattatttagtgcagggagagatcttttaaaagttcgaaggtttgctttacaagcagatactatgaggatgttgacgttgatgaaggacattatttagttgattggttgaatttattgattgattggttatattaagaaggagagtaattaaaatttttaaatttgttaaactattcgagggaatactgtacatgcatggatgatatatataatggcatgtcgtagttattactactagtggttggtgaaataactgactcctgtcagaacagataataccatattacaggcgctcttaagcgtgtgcacgctttttggcctagtcgcgtattttgctgtattgcacccccatctcgcgacaactcctgactagtcaggtgactatatactaagcttaattagggtagttcgccggtctaccgatattatcggcgaaaattcatacgatatttggtaaattatcggctgctgccaatagcttcagttattatcgtttatctgtatcggctcataaaattggcgcccgataattaacggccgataataacggccagataatatcggtaaaaaccgatatcgggaacagccctaggttggggtagtttgctccattgaagtccgtcttgggtgacgtatactgggagagcgagtaaggggatgggaaccaggcatcgtcttcagcttggtctcgtacgggagcgcggtcagatgagctagacatggtaactgtgaagttcttctgaatgaataggagaagtaatgagatgatcttctttatcgaagtttggtaacaaaaccactcgagttcattgatacagggcaagggcaagactaagccttatcatcgaattgctgcctgaatgcggtctctgtccttgcccgtgatgatgtcagtgatatagtctatgacccgcacaacttgtgagaatcaattttatcagcccagaattgggaatgatctatacaccgaagtccatttaatggtatacacgggttctattattgaattcggaacgattgcaactcccctattgttcttgagacttacgaagtgcggtgttctcatgccgataaaccttgttgagcggggttcctcacgtccaaaagagaaaatatgacttcgcactcgtaatttcgaatacggcagcctctcaatgcagcaaaaggtaacgttccagactgcaaagcccaagtccgatggcaaagtccgacggacgaggtattttgcctaacggtatttgaacctactgaaaatccatctgcaggactagtgagtcggcctattctgccaccgccagtcaaacgggcgtcgccgtatatctgtctcgcccagctaccccgcttctacacttcatcccaacgccatccggcagcctatcttgactcttatgatatcatatagtactgaaacactattgccactatgatcagtgtagaaacaaatttttatctttctattgaggtatgagttggtaagatttctctatacaccctaaatctgttcgggcgtagtagagtgggctgttcccatagtaaaaaagtcttggcaaagggggggaaacaaggtcaaactcgataacctcccctctctccctctctccttaggtatattaaatcttgtacttttcaatcgggctggatctttccgtcgaataattatttatttgttaagtgttggatcccctgtactgatggtattgtcctgttaccctaatacgcactatttcctagaatttccaagttttgagtgcaatatcaatcaatattcaaaagcaggactagaataagtgtaaagaatagtatcatattttggattttgaatgccaagaccaaaattttatgcaaaactgggttcaaactgggtctaaactgggttttctgggggcctagtcactggttcggggttgggctctaggtcgtgatttaggacctaatttgggttttgcggaagcctaattgggataatagattcataccttctcgtgatatccggtgttaatccctattggggagaccaaagtgaacccaccgtggttgtacggtctggtccactacagcgcacgaccgtacaacggaaggactataagtagatcgcgtaacataagggctttggaagtatctaggggtaggtgtatattgtgaatccagctcctatggctcgagctcttagggctgagagatgtcgtcaacgtgatataggctgtcactcatctacacacgatcgaagctgtagagacctgcgttagcttacgtgggcggttgaagctgtaaacggacggaacctatgagcgaatataaacggcagtagcgagtaggatccatggggtaacacaaatgagagccatattagcctacttagtctaccagagttagtcctctgcagcagcagtacagccttcgtcatgtaagaggtaaatgaagaaaagggctgcggaggaaatgaagaaaggcaaaacagtgggcagaatcaagctagatcgccagattctcctcccgcaccttcgagaaccccgcctagaacccggcgccagctcatgtgcgcgcgctgattggctgccccctggcataataatctcggtacagatgccaagcaccatcaaaggaacaaagtggtaaacaagaaagaagaaatgaagggaaaaaaaacaataatctacagcattggcccaaggtggacactcgacgaggtaggcctaatagtatgtggacaccgggagagtgtcatgccaagcatcttgggagagtcggggctttcttggtaaagaaggaaaaagacgaggaaggaaaaagacgaagaaggcgctccactcacaatgcactgtactgagccatcgtgaatggtgagatagggccaattcgagagtggctcccacgggccccctcctctccctctcgctctggctttcgtccctggggttttgctctccttttctccctcgtcctgaccttctctcccccaagcttgaagttttcccatccgaccagagggactcgtctctctaccacattcatttttagaaaacgtctgccacctctcgatttcgaacgatttcccactttgtgtctggccagggtgtccaatgaatcatatttctcgcattgtatgacttcacatcctcagaccattcattattacaaacagcttttgacatcgcattagcatcttcactttcttcgcaatgctcctcgaaatattgtcgctttggagatctcgccggcaaggccaaagctctcatacgcttcaggagaaacaggccccggtttctcaagataacaatggcgtcgagggtacagacactggaccccgggaggtcccagaagccacgccggcgaatgtagtctgagtcatagcagacggcttttggacttcgggccaatgatagcctttttcgagagtctactggaactgctgcgcacaaaagtagttcgttgcttttcgtcttaccttcgttattggttattgttggacttcaatttgctttgtatctatcttttagatttatctccaatcgggagcgttaataattaatatatctttgactgcactaaagcttagcctcacaaagatttgccgcttggacggttgactatggactgctatgtacgtttgtttggcaattgttacgccaaccatacaaggaggtacagtggcgtaacattaatatttgacctcaggtacatcggcccctaggcccacttttatttactgcccagcagaaacctaatgaaattaatccaattcaattcaactagtagctagtatgccaccctccatatttaataacatcagctacccggtgaggcatagtctccgataaatgcgcaaaaatatcaatatctaagccctcccaaacctcctgagcggcatccaataaaagatccaatgtagcttcgtgattagagagatacttcaattcagggtgacgtttcaatagctcagcctttagtagtgcctataggttctcaatagggtttaagtcaggtgaataaggaggccattccattacctcaaagcctagctcgttcaatgtgtcccagacaagataagcagtatgcactggcgcattatcgtgttggaaaatagcatagtgaacattatgaaccaacgttggtaatacacgacgatagagttcatcaattgtccgtgatgagacaccacatcgaggagcttctgggtctccatctaatggaatcaaccctgaacgacgaggttgaccacagaatgcagcccaaaacattcgtttaacttgcttccctcgcgatggaaccatttgaacttgagggccttcgactggatggtgattaagttggtctttggacgagtgaatgtccattcctggcgtgcaccaataccacgttcacttgtacattcgtcggaaaaatagacacaagcccagcctgaaggctcaagatgttgccatcttcgagcccaacaaaggcattgctcggcatggattggctttaaagctggccgacgcatttttttccatttgcgaagacccatctggtggtgaagacgccaaattgactgacgacgaaccttaaaatcgacttccgtaagtagtttctcggtcgaaattgacggtgtttcttggataataccatatatattatctctatcatcctcagtaaactttcgaggttgacctaggcgtgggagactctcttgttttggcgttttgactcctgggtaagagtatattgtatagtagagcgtggaatatcatgaaagcgcatctttttgatagtagttgcgccccaaccattggtatgatgtagctcgcatatcttagccctagttaggcaatcgagttctgggcctcttttacgtggagtgcgtataggaggcatagtatagggtgggtagtaagatattaaatattgtataaacatcgcgtaaaatgtaagacgcgtacaaccaagaaggtaggcggtcacaagaggcggtcaaaccccctatgtacccgagatcaaatattaatgttacgccactgtatagaatatgcggaggaggcgcctatgcatcaccggagccgcctgttgatacatcacctcctcttcagcttgcatacgcacagaggcatcccctttataaggaaaagctggcccctcttaggaggaccagcgattagtctgatttctgaatatcatcatactcatgtcaggcacatctcacattcttcactcgtatccttatcgtatcaggacacctccagggactgtcttaacaaagtggcgagcttggctcatctggaaattcatcccgcagtgttacagaatgagaagggagggcatccaagccatgctgtaaaccaaggtgtcagtaactagcaacgatctgcgacaaggacgtaacaagccttgtccagtaagcagtgcgtatgtctaagaggtcccccaaaaccttcatgttcccgtaatcttgcgccttttggacagtcttctaacttgtctagttgcttgcaattatgagtcagtatgaagagggccaccgccatctgagcctctagagccaagttatccagagatttgggaagcctaccttttcgttttctccttcgaccccaatgggtatagacatgtcgctcttacactgctgacataccggggagtcgccactgcacttcgttttgtgttgccgacaggattcgcaagcccgagacactcgccgaatgtatcgcggcgcaatgcttgaccgatggcggggaatggcaactttgccatccctagaaaccgccccctccgcccggctcgttccaagttgaagctgtcaaccaccgaggtagtctggagggaatcaaggctgggaggttcagacagcttattttgcatgccgttttgagacgctagagcctcgcctggtggtctagcagcccagatcaccctgggattaacagaaattctcatatgtgccacgaatatttcattgatcgtcatgatggcatgagacgccactacggagcgtcataatcctgatcccatgggtactgaagaacgtgtagaatgaccgagggccggcccgtggagtaccaaggtagtcccccttggtaagctcccatcaatgacatcatgatgtccgttgacctttacacgcgaagccaaggtacgagaaccgcgatattgttataatactgtactgtatcatagcgtctacttcctgccttcccaaggttccgaatatgacgaagtctttgacatcatgatagcatctccattgaatcatctttaccttcggctattaattacagtctataaattgtcttgtaagtgattacaggtaaatatttaaacagcaattaagtacctaggcactacatcaaattttcactttcatgttacccatcatacctccacgacttcgggaatatacagcatttagtcagcaacttgtaatctcaccatgtcgaaactctttggaccactcaacattgtgcacaaagatttaaagcaccgcatcgtcatggcaccccttacccggttccgtgcgagtgacgaccatattcaactccccatgacagttgaatactactctcagcgtgcttccgtcccgggaaccttgattatcacagaagccacaatcatctcaccaagccacggcggtgtccccaatgccccgggcatctggaacgacgctcaaattgaagcctggaagaaagtagtggatgccgtgcacgcgagagggtgcttcatcaactgccagctctgggcacccggtcgggcggctgataaagccacactcttgaaagaagctgggcatgggcttctgtcggccagtccagtctctttgacagattgtgcctgtcagccccaagccatgtcggaaagtcagatccaggacgccgtccaggattatgcgcaagcggcgcggaatgcgatgaaagcggggtttgatggggttgagatccacggggctaatggctatttgctagaccagtttttgcagaatacctctaaccagagggaggatgcttatggtggaagcgtggagaatcgcgcacggtttcccttagctgttgccgagggggtcgttcgggcgattgggccagataaaattgggtaccgtattagcccttggagctcgttccagggcatgcggatgggccatccaattcctcagttttcttatctggttgagaacctgaagactctgaagttggggtatctccatgtcattgaatcgagggtgcacaacaatgttgatgtcgaaaagacggagggaatcgagtttgcgttggatatctggggaaagacttctcctgtgttggttgctggcggatttacgccgaagtctgcgaagtatgcagtcgatcaagagtatccgaacaacgacatcggtgttgtctttggaagatcttttctcgcgaacccggatttgccatttcggattgagcatgatcttgacctcactaaatacgatcgatcgtcgttttatgccccaaagcaggctgaagggtacaccgattacccgttcagcaaagagtttttggtttctgtgtcaggataggcatgctattcaaggaatgaccgacgatgagactgggatagccgttcaatttgtgcagaatagaaaaagagggttcgactgtatatccttcaaatcagcgctatccaacccctagcagaccaatcagccacaatatcaagctcctcagtcaccaacacaatatgtcagaaatatggtgaatttgcatgcggatttctgggtattcacccagagtatcttacgacatcaatatcaggtacctctcataaaagtgtgtcggaacgtggtcgttacagtacgaactagtacgggcatagccaattgagtacttgagaatgtgattttgaaaataaggctataagagaatgccctgaaacggaggaacgtagtgaaagggtttacaaccgtgggcctgccctgaaacgaacgaagtgatgagaggagggggaaactaggcctcgccaaacgcgggttcggggcgggtttttggaaaatctgttggtttattaagtgatgcttcaatgctcatattattgaggggagttgattgtgtgttatgttgcatgtattgtgtaagatacaagtagactgagaagtcaagtatatgagtatgcatgtgatcccaacctcattattatccatgcaaccagggtatctcaacaaaatcttcttgcgtacccaaattacccgtttgtacccatggaaatgtgagagtcgggaagcacaccgcgttcctattggacgactaactccttatatacagctgactacgtcgggcgctaaacccaaaaggggagagggagaatcctaacacccctcgaaccgacacaggaagcaaaaggacagaagcaaaacatcccaaaccagaacacagccaattcgatatgtccattcagaagaccccaatctggcccccgaatctcttgaacgattcctcagccagtggcttcgtgaaaccgtcagctgccatatccctcgtgccgattggagtcgggttgatgatacccctggcagcaatgtcgcggacgtaatgatatcgaatatcaacgtgcttggaacgcctagaaacgaatgacgttcgaacaagatcatgggcacccttgttgtccatgtaaaatgtaatgggctcggcgtctgccgcatataaacccatgtcggccaccaacctagtgagccactcgacctctctcgcagcgtcggagaccgccatatactcggctttgttagagctcaaagccacagaagcctggaggtgtgatcgccaagataccgggccgccagctagaagcataacgtacccactacaagaacggcgtcccggtgtaaggggaccgccccagtctgcatcggtgtacagtactggtggaggcaacattccgctgcctggtctgaagactatcccaagttgtttggagcctttcagatatcgaagaaccctccgttgtgtggatagagtcttctgtgttggtacagtgttgaagtgggccaacaatgttggaactcttgcgatttcaggtcgcgtatgggatgcaagccactgcaatgaccccgttacgctctgatattgtctcttgtcaatactcaggtcatgcaaatcgtcaatgaccagacccggttcaatcggagtggcaacaggatagcaatccggcattcctgcatcgtccaaaagcttgtcaatgaagtcaggctgcgatagcttaatgcctgcttctgtctgttcaacgcgaagcccaaggtagtgctccatttggccaaggtccttaatagggaactgttttcccatttcggagaggatccattgtatctcggtgcggttggcaccgatgattccgaaatcgtcgacatgtgcagtgacatatagattcggtttcgtcttgtgaagaaatagccctgcatcgtaagggctgattcggaagccaattgcttccagtttctcccggagggtgtcgtaccaaatccgggctgcgggtataaggccatagagggcctgtttgagcttgcagacaagagtgcctctctcgccctgctcgaatccatacggttggcgcatgtaaactgaatttggtagcttcccattcaggaaagctgtgatagcatcagcttgagctatatgccatccataatgtgcggcggcagcgaataacaccaattttgttgatgccatgacaaaaggtgctgctgtttcgccccatagggattgatgtccgttggaaatatttccacggatcacccaccgcgctttatatcgcgtggtgccgtcgactgcctgcttcttcgcgaatccccacttgccagggataggacgtagcccaattgggacgtccccagtgcgattcaattcccacgtgttccgtttgtgcaggtcgtcaacttccttgcgacatgctgcgtcccaaaggacccgatcgacgctttccatagcttccttgaagcttcttggcacatccgctgccgactgagatgttttggtcatggctgcgaagactttgacttctttcgcaggtcgtacccaattatcatcggtgattgggtccgtaagctcctcggagctcgttgaatcaggcgtttgtttagtcacttgctcccccccttggaacggggtttgtctggctgcgcctgtcggccgaatgtctccagtgttgaagaggcggccagtctctggatcccacacggtgtagatcgaggcaccattgtatccgacaacgcgtcctattttccctcgaggttctagctttccggtcggttcgctcgtgccatggaggtggtaaaaaatgctcgaaccgaaaggaagcaggtaactcaaatcagcagggattttagagatcgcttcgatcgggatcctggtgtcctgtggctggatgctctcatcgatcgtcgttccaccaggtgtggggttattttagagaggagtgctcgtcggggatatattggcaaggaaaactgcagcgactagcgcgtgaaaccagaaggtcattgggagacctgatgctatccacatcgcgcgcgccttctctaataccactcgattggcccgttctgcggtaccattctgccacgcagaataagggttcgatggctcccactggcatccccactctgtcatcattgattgtaattctccggatccgaattcgttgtcagatcgcagaaaagcaggtgttttgaatccgagattgttgatgtgctgacgccaataccgcagacgtgcagcaatttcgcgtcggtctcgagagatcagactgtaaatccatcggaatcgcgtcgcatcgtccgtgatcaggagaaaatatttatagccatgccgggactgcagatttgccgcttgagaagcgtcatcatcatcagagaaaacgtccccgccacccacgatgtcaacgtggatgcgcatcaatggccgtgtggctctcgaggcctgccgacgactgtatcgtcgggttatgttcgcttggaggcatacctggcaaggcggttgggccttgtcgcctgtgattttcactccactgcctggacggttggcaaggtagagtacatctcggtaattgagatgtgcaagcgtgacatgccattcccaaagagtcgtagggaaagcagatttgatatcgatcgaggcttttgaaacatgctcatctccactagatggcttagccttaatgttgctctttgcattagagctgaaataagcgactagctgctgttcgccagctatcggaatgggttcatcagaggtcaatcgtgaattagcaggagttgctattataacgaaggcctgactagagacctcaaatggttcatcagcggtgaatgtgtaaacatcgcttgagtttcgaacggcaaagaatcgctggttcgatggatcctccaagacgtagtggaatggaggtgttgatctcttgtgaaataaatccctgatcatgcagaagcgcctctgacacaaggttggaatccgctccaggatatggcggacgtctttcagagtgacagttaggtcatttagcttcatattgactgttcctgttgagtatcgcggtggtcaaagcttatggcgggactagcgatggacatttaaatagatgggattcccacttttgatagtaaccttaacaagaacattacaactacctatctcaacagggtggacctgattcactgggtggagattcttcggcaacaagatacgatgcttagatatggattgactcgaggcttctcttgtgttaacttccaataaatgtgctgaattgacgtcatgaatttcattatttagacatgtgctttttattacttatgattcaaaagaaacaaattctaagctactatagttcaaaattcatcaaaagtagctgtcgggacataatatcccgttcttggtgtacgcgttcttgcgcggagctgcggctccggtgttgtgaccgccgagtgtccgtgcatgggattaaggggtagttatcttggaacctgacctgacttggaaacatacatacaacacatctatcttacatgaatcaattgacctttgctttggaagcataaccactgtccacttaactgtgtacacagtacctagctggtgataccaacagttactttaggcatcgccttaagcagtttggccgccactgaagggcaataaaatgcaactgatatcggaccgatccagccaaatattatttgtaggacccacgtataggatacctcgttttcctctgacatcagacaaaaagcaatactaaatgtagtattagaaggagatagaccaatcagatgaagagaggcatccgaaagcgattagtcttataggtacaatccataagaaaacccgattgtacttgcgggcgtactcaatcgatatcggatgggcaaagatcagttaagtcaaattaccgctttcgtcctgtttgctatcataaaaccaatgccggcttttaattggttctcaaggtattgtgccgacatcatatcccctacaatttcacgttcaaattgtttgtttaggttgtataggccccgagataagaaggtcgggatacccatttcggatgagatgaagagtgttccgggtgggggtaccgacgtcaagataagctttaacctttgctttgtgctcaattttttaatcgtttcgtctgggccctcggatggttaattagctcagcgtgatcgattgtatggttatgaacaagatgggaccgttgcacgtgccatttaccatgccatttatccgaatttgccttggccgagcgcatacaatatatccaaaaagggcaattatcgaccattggtcccttctttttgagtggttcgtagtcttccggcttatctttaaaccatctggtgtcgtatttaccaccgcgatcgcatttcatccgaaaattgcgcccggactggacgtgcgagtaacggcgacgtagccctgcgagatggcgtaatcacgtaatgcctcggcatttcctcctgggtgtcatacgattggtcaaatggggtagacattgcgtcgtagtgatgtaattattgtgcaattgtaagcgaaaattgagataaatatagggtacactcgcggggattattattattattattaattatttaacgtcgccggcaggtcacttggcaggtgacccgctacctcccgaggggtaactggacgtgctacctaagcgatgatttactacaactagctagctagctcaactaaatacacgctggaaagcagcaaatttgagcacaacgtgctgagaaaggaatcgaaggagcgccaggcactatcctggcctgggttcctgggggtggagtacccggtctgacacccggtctgactacccgcggatgggagagggtgccagcctctcccatctaggcagaggtgaagactgttgcgctatgcggcgcatgtttgtgcccgatttggacagatatccttaaagaaggacgtttcttgcacgaaacggccgaattcctcggccccagcagctgtgctcagtatccagtctatcattgcagatgggctggcctttggacctttccatcgatccttccagcgtttcctcgcaggcgggcagaagaagaagtggacgggggattttggcttaccgcaggagcaggtcgtaggggagtccctgtgatggaacctctcgtggtacacctggaagtcaccatggccagtccgcgcggctagtagccggccgagcaccccgcggggaagccggtgttcccgagcgcggctgttcttggtgtgaggttgaatatttaggtcttggtatgcctagtatacgcaatacgcgttgccgcgcgggtatgttgtttcacttcgcgcattaggtaagatagggaagggggaatatgggagccgtctaacgctgcgcccctctttgctagctcatcggcagtctcgttccctgctatcccggagtggcctggcatccagcgcacctccacgggcgtgcggggtgtgctgagaatatagggagcagacttccactggatggtgagctttttgaataatttcgtgagtttccttctgtgtggcgcaggtctcccgtccgcgagtaggctagcgacggcgaggttatcgagcaggataacgaggccggtggagtagcttgcgcagggtaggtcgacagccgcctggaggccctctactgcccccataagctcggcgtcgtacacctctgtctgggagccagctgacccatacccttgggtgatagggatagggccgtgttggaatatcccggtcgctgagataataaaaggctgggatcacgtgcatacattcacctacctcaagttgcacccccattgttccatcaaaaaaaaaattgcgtcgtcaatgcgaccgtacgctctagacctgtcgacctcccacttccagctttgctcccaggatcatttcattaatttgccccacaatgacccttcgtgcttgaacctctggtaggacgatggcgagtttgcgaatctactcgagaggtctgcaatattgtcctgtaacaaaacaaatcgagagatttcatgttcagtgcagcaacgagatggatcagttgatacttcctcttttcaacgagtgcacaaatgaaaaggccgttccgagcgtatactgtcaattctttttcgccatcgttgaatgaggttgattaaccaccacacgctcccaggagcctactagaataccatgtatgagcctcacaggcaattttctcagccaaccatgtactttgagctagagggggaactcagaactcccaagagcacccgcgcctacccgtctcataatcctgtctgaagtgataccagatatatattgactcacccctagtataagaattccaacatccttctgccgtctgtactaaagcagagtaaagctctgccttgagcatctcaccatgagttcgatcttcgcaccccttggcttccttggtccacactaactgatcgtacttagagagagtcagtcctacctttgcgacctcgaaccagtcggtatcataactttcaccacccgggtcacagagcgaagcatctccacccatcgggaagctccctagggcaccgaatatacatccggcgcttccaacttgacagggctgtaccatcttttgttgtccgtcatacatactgccctggagagatctgcatcaccatgaggtcagccagagcctagcaggctcaatagtggataacgacatcatcttcagcgagaattctggcgttgggtcctagacactgacgaaaagattacttcctacctgactgacggtattatgcgcaagttggacggtaatactcttgatccttttttcttcggtgatatggcagtgcgtttgttgccgcacctatgggaaagcaccagatacagtgagtctcgaaaccggtgcaccctccaacactcagagagattctttagacccaccgccaagatgacactagtctattcctagagtcttccgaagtacccctgtagtgaaggcggttgcaccggtttcgaaacgcactgtacaacgttggagaacctcgattcgtgcgtaatactgagctttttcgcacgcaagccccccccccccctcctcttctcctcgaataacgaccggctgactgattttattcaccagcaatgatctctgaccagaagacaaacgcagggttagctgtggagagtgagatcttgccaaaaatcgttgaaagtaaagaaaacgcaatatcaagtctgacatggaaagctcgcttttggaacaacatcatcacggcaagcttccaactgtgggctgaccgtttccctactctttggctcctgagatttatactgtacggaaaatatatatcagccagcattattaaattcctacgaaggttggcagtctttgctctatgacatattcccagtctttcttgcttcttctgcaaaaacctgctggacattttcaatcggcacaagtttatcttgtatcgcaagccaccgcatctgcagatttcttctaccaaattgggacgtgtacgccccatgcagctttggattcttccaaaaaatgaaagttccatatttgcagcgtgaagatgtttccaactctctccccagtccaaatcgctgatgccaatttcatctctctttagatttacattactgtataggataaaaatgcagcaagaaaagcgaggtctcaccagaatttcgagaccatctttcacagcaattcgaccgtcataatttcaggagtgtcctactcaactacagtcgaacgagagaaccctgcatgatattgtcaggcattggctctaagcgcaagcgtatactatgagttcgaagaccaagaagacgcatatctgtctatgtgcttgaaaaatcacattgctttggctagagaacggtcgcgaattcccagtatatggcatcggctatggcatctctcgatcccggaagcttacttgcgaccgaggtgaccatcattgccatgccaatgaggttctttgcaaagaccgggacgcgtttgattgagcaatgaacgcccttactcaatgcgaaatgtggtaatccaccgatagtcgaaatcagaatcgcctcaagtactttcctacttcactacaattcgatatcattttcgcgcttcgtcatggctgctttggcgcgtaagggatacacggcatcggtatctctctctgtaaggtaattaaaagtcgaaatcggctaacacagccaccgttttaatacaggcaagccacagtggactttattttttgatacataaaacaaagtcagttccgtaacataactgcatcatacaacggtattttgcctaggcccttgtcatttggtatgaactactcagatatatgcgaaatgaccattttctaaaagattgatggttcaagcctacgcaggcttagacgcgttttttttttttttttttttttttttcttaattgggctgtaatgattcttggccttaaaatgaaaaggcaacctgatgtgaatacaatttcattgacgtggtttcatatggaaggtatccaacaataatctccaaggtttttcatgcggactaacagggacaaagttgattgttgaagcctggatttggtgtttcctcaaatacttgagatcaatgacgatatttgctaacagtctgtcgatcagacagaatgacacaggtgctcctagttacattttcgattccacggctcgtttaaatcttatcattctctttgtagctaacatggacccgagtcattcgcaagagcacggcaatccgcgcggaacagtcagtatacgcccaagtgattactcatcaattctatgaagtactagcgaacgaatctacagcagagcagtgaagctaaggtctacctgaaggctgtctttgcaaatggagatattggctcatactctcatcccatggatgatgtccagacaaatgataagcgataaactcatgataggctcggtatgaggcaaagtgctagtctgtcaaggccaaaatcagtatggaggataatttttggatgttattgggacatctgcccttcgttcgaccgttcatcacttccccactcacgtccttatttattctaaaccgactgttcttaaccgactgtgcttgaccgtttgtgcttgaccgtttgtgcttgaccgtttgtgcttgaccgtttgtgcttgaccatttgtgcttgaccgtttgtgcttgaccgtttgtgcttgaccgtttgtgcttgaccgtttgttcttgattgtttgttctttatttttattcaccaacaattgctggctgtttaacaactatctgccgtcaaccgttcaatttttaggtttagttataaaggtgttatttgagaacatctatgtcagaaaatttgcttgaccgcaacctggccgagtcagtggtaaccgcagccccacaaagcaattcgcgataataaagttcgtgttaagcagctgtagcagtgcaacaaacaaacaaacaaacaattcattaacgcccggcggctgaaccgaaagggcaactatcgctgatctactgtacatgtccatctgtacatgctgtgtctcctgaaagcccatacacaaaaccttatcacatatgacattttcaaaaagccgtgtcgcagcgagtttctcgtgagttagtaagtgggtgagtagactggcttgaaggcgcttcttcaagtgttcaacatcctatcttcggcagttgaagcgcgtctaccgtttgtcacatggttttagggctagtaggtgggggggtattctaaccgcattcgttggctaggttaagtggcctcaagtcggccgtagcaatcgcaaatcgtattgaggctcgcactgcttccaaattcggtttccacttttgatcatcggagggtggcttccctcctaagaagaaggacgtattacttcggtgagtgtgggtgcattgcagcatttccttccggtgggcggtctacttccaacatcgaaatagaaatagaaattggtctacggtctctctcgcttgtccacatgtatattgacctgtctcgacggcattgattcgaaagagatatccattgagtcttgccaccgttgttaggctgcccctgtggcgtacgactgcgaaacctctataacgcctcggcgaagtccaatacggccttaaccgtcttcgccctcgagacggtgtctagattacctctcttaccttcggttgagccttctaatagactcgacacgctatttaacgcgtccctaaccctactccttaatattatctgtaaatctcgtagttttagatattctaataatatatagccgaccgtttcctacgcgccgtacttatagcgattgtcgtctcggaagctaaatttcttagcatatgtgaataactagttgtagcctatacgtagctaagtgagtaattatactcggttcctaggtaggttcccgtatagttttctagtatacctcgctggtagcacgctatctaccttctgtagatacgctcctttggtacttaagttctactcctactcctactaggcgtaaatcttactacggagaaagacgttctctcttattagtagcggccggaaaggataggttttacccggttatacagcttctttagcgagttgatccgcggcctcgttcccgacgattttatagtatcctagtatctattagagacggaggaaaatatactctgcttaaacctcggtagctacttagaggattatatagataattcgttaccctaatctatttcttacgttctagattacttataaagcggatctactattgtagaggattattactattatatatatatggtctccgacgcttacctattagtaagctaacttaaataccgtactgactatatagaagatacctataagttccgctatataaaccgactactgttctatcgaccctacttatacctattaggattctattaccttattattatcgtttagggcgacgatagcggctcctagatgacccttatgcccggaggtgtctgagtagacgattatatctgatgtatcctttacggacgctgccctatctctcgctatctctcgatctagtttaagcttaatctctataaaggcgtccttttactatagtagtagtgggcgtagattaattgtctctaattcgttaagccggtcgatatctatagtttttatcgcttccgctagaggaaagcgcgcgtacgaccctatattatttctacgattctaagtatgtgataatatactcctaatagggtagttacgcggtagagtatatagtcttgcgatagtatattacgcgcgatagcggagacgaagttacgtagggagtatataagcttctacctctaaggtcgcggttactaccgtcctaaacgccgataagattctaattagtacgtttctttaaactatatttaagtatcggatataaactttatctctaagcgggttatattagaccgtcgatatatagtctactataggtataatatatacctagtagagctatcatatctgcttagggtgtaagtatcgtagtctacttaaggcgattgctgttttagtagcgcgcttaataatctactagatatactccttctagtgaagtcgctagtcgaatactacccctagtaatttagctataggtaatagcttaacttcggtcctatcgaagatgattcgtccgtctctatactctctcttctttctaataaggtagataagctcggttttctctactataaagtaggatctagttctctatacctacttttcgatacgagggatatcctcggattatatcttagtcaaattttctagaactaagccctctattctctaatagaagtagtcgttaataaatactaatatacctctctaggagtcgataggctagtcgactaggtcggtattaaagaatataaataagataggggaaagtagtgatccttaagctagcctagcgtttactagcggagtagtcttagtacagaagtcgttaaacctaatattagtgtactggtagcttataaagcttaatatctattttctagctataagcgggatccgtcttacctatagcgacgtatttaggcttatcctattaactctattaaaggtatcttttaggtcgaaggcgattagggttactaccttatacttatactaggctttatcgatcgtactagatagtactagtagggcttacttagtagtcctacccggccgcccgccgaactagctattaggtagtaggctatacccttccgctatataggataactatcgggctattactacctctaggagcttactaagtatatttaaaagtgagattaggcggtaagtactaggggctaagtaatccggcttacctagtttccgtaagataatgattttcgcgctcctctactatcttaggtagtatcctagctctatatatactataaagatacttataataatagcctttagatgcttctaaagcttcttctagactagtatcggtaagttatcttccccgggtatagtattctctttagctacttttagtaatcgctcgatctctaatttagtaattgggtactactaaagttccgtctccgttatagtgggtaggctgatttctggtatatttatggcagggaagaacgtatctataaatgccctcgctttatctttattttaggtataatcctctgagcctatttgtagtgctgggatataaccctatatctctcagggctttatatatatcgcggccttctagagcttccctttactagctttatctaggaactacttctagtacaaggacttggctttctcgatggtccttgtccacacttgtcgtttctactgcatagcttcgaaggtagccgtggtataagcgtgctctcttcctaactcggcgcagtttgcctgctacctcctacgtagttggttgactttgacttattagatcttaagatctggcgtgaactatcgcttagagtatagcgtggggcatatatcgggtataaaccggttgactacctaggctatcgccgctataagggtttctactacccggtcgagtattagccgggtcttaatctatttctataggtttatctgtcagactacttcttcaccaattctcgcctagtccgcgcgctcgtatactttcttaggttttatacttagtttactctagggttataggctctattccgagtaggtagtacggtagtctgatctatagttcttataatataaatggtatttaacgagtaatcctaggttatttattactatctagtcgatagttaagttctatcctagattatttagagcctagtaagttgccgttccccgagggaggtaactagagagattataagtttagaagaaggtgattagatcgctagtatctttaataaatctaggtaggatataattaccgccctatatcggataatatcggttaaagtcgcctataataataatacttatagagcgttacttattctatacagcagctgtaatagtatttactattacggtaagcgccgggattactaatacgttatcggctataaagagcggtactagagatatatagacagaaaagaaaagagtttaagaatcggccgtctagatcttaatagctacaatatctaggtggttgtaaggaatttgacggtataaggaggtagagattcgtctattcacgtagataagactacgaaaccgaactacgttagtctgcgtggtaggacgataaagtcgctaggcgctatagttgatatatatatagtaggttataatcgatagctcttagattagaaggatatctaggtcttagctttagtagtcgttaataagtacttctattcttagtcctgattttataatatttaactgaaggatacataggttgctctctaatatcagttagggtaagaagtcgcgggggttagatatcgtcgatctccggtagcgtacttacccctatagtcgaggtagcgggccctaattcctagtaggcagcgctactgctcgtattaacctatatagtatccgtactgcggggtctccttacataaccatactaggtatctaaactattaataccggaaatatctctttttcttaatctcgtatcgctctacctaagggatatagtattaactaataacgaaaccactacggagtatatatttagctccttctatagagtcaaactagattcctagcgatacgaatttccctagggccttatctttcgattttatctaggctagttcttcgatatagaaactgtattctactaggtcgttcttatagataattttttccgctatctaggtagtacctttttctagattgaattccttagtaagggtacggtatactataataccgaaacggggtttgactagcttcgtattattacccaatttatatagctactaagtattattactagctacctaagctaactctacgttcttaaatcgaatgagatagccggttttagtagtaccaattcctactacttaggcgtcttatattatagcgtcgctctatagtatagaacggatatggttattaacagtattagtagggagatatcgcctaaacgcgtttctattgttattatcgttatctcttaggtctatagaggctctctaggtactaattcggacatagttttactctttctcaggtttctaatagtttagcgagggtatagtattatcgctagtagctacgactgctgcctaagtcctagtcgcggtaactgtaggggcgctttcaacctatactcgtaacgctttcactttcttataaagcttctcgttcttttcttataggatatattaattatatttaatctcctatagctcgttctaagtggattcgataaccgcggtttgatagcggataatatcttttagggtcccgataagtttctatacctctttggtagtaactcgacccgagttctccgatagtataaatatatcgccgctctgcgttcgcttatagctttcggtaggcgatccaggggatccgatatttactctaggctagaaatcttctaccgagaagctagtaggagtttcttaggtatttataggagggggttcgggccctcccgtaggtaggtctatcgtcggtccagggttagttcccactcggcacacaaccatagctgaatatatatatcgaaggtagtatcaaccactctaaaagatctcgaacctttttctcttggtacagtagaaaccgaaaacctgaagggtatctgttttgggcagatacagacgcgctcgaaatcagtttcaccatttgactctgtttgattctttcctgaactcaatcctgaaacacgctagtctctgttttaatttaaccaatttcaaaatcctgaatcgtactgtaacccaaaatcacatgatcagctacgttataattaggcctcgccaaacgcgggttcggggcgggttttcatttttccaacccgcccacgggtaacctatcgcgggttttgtatttcacaaacccgcccgtgggtttttggaaaatcttcgtgggtacccaaattacccgtttatacctatcaaaatatataactgatacataggtaacccatcgcgggttttatattttataaacccgcctatgggtttttagaaaatcttcgtaggtacccaaattacccgtttatacctatcaaaatatataactgatatataatatataattagtcagtctatatatttttggtaatttattttggtaccgatttaatataagaaatataatctaataagataaaatatctacccctaaatatatatattaataatagataatagctatactatattttaggccgattgtctactaccctatattttcggatactataaccggataccttaaatttaagtaggtcctagttatataagtatcttctatattagaattgttacccaatcgagataagaaagctagttagataataataaatatatacttaaggtcgtttatagtcgcgcgggttttagatacctataggttaatacaacctataaaatacgttagaaaaaaaaataataaaagagtcttaatctaaggtaatagtatctctaactatataatactacgttagatttaaaggctaagcctcggttacgttgagatttttagaaaaatatcgtcgctattaactaatcgatctttaagtcccttacccttaattaaaccgtcctccgattccttcttagactctgatttccaatcctcagtataaatattaagattatatatacttaaatcttacccccctattcccgacgcgagcgaatatactaagtagctatatagccttttagggaaccccgatagagtagtatatttaattaataacccctgctgattctaaaacgcattagaccgaaccgtagaaagaactagatcctatataaattagagaactcgattgactttctaatatagtaggctaaaacggaatacaggtaagtactaaataacgaaggccgatctagaattaagtagtggatagatttatattataccgaagtttagggatacttcgactaagttatagatatcttaactagccgacctaaggtaatctataggtcttatttaactttattagatcacctataatataagaaatataggataagcgctataggaaaatattagagatctaaggcttatcgatagggctagaaaagatcctaccgttagatacttataataaactctatctagaaggccttcttaggagctttatctaattataagaaatttactaccttatagctcgaagaaaggttactaaagataatagcctatttacgattgcctttttagactattaagaatcccgagttcctagtactacttaatttaatttactccggcctaggagaattagaaatctctttagtaaagactctataacgttacttatataactctattatagtctaataggagtcttagttacgtgacttacccgaagatataaaagtttcccttatactagattgttagattagccctttttaataagcgtttatagcgattatagtatactttatcgataaagattagaactatcgtaaaatacttcttaggtttaagcctctatacagagcttatagtagcattaatctaaacgaagtacttctttaattacttaaggatagataacttctagatcgtatctttagtataactatagataatataataaataacgagactcttatctaagccttataggagttacttttattaggcggcgctattagtacgagagaatctattatacgtatactatatatagcttatataatttagctttacctaaagtaactgctaggttatattaaagccactctaaagaataaagaagtaagaaggttttagtctaatacttaagctatctatctaagagattctttagagtatagtaatatagcgtatactctcgtaaaggtatatttaacctagaaaaaaaagactataggaacttttattaatatttttcttttaatagattcggttatttactgtctttataaatataagcttataataaagagacacctttttatatctttaatcgggtaggactcggcttttcctcttctataatatatagacccactagaactctacttttttaatactttaaagagcgcgctggcttaggaatactattaataaatactaccgagactataaatatagctaatttaaagttatagatactaagtagtagtaaattgactatatagttaatctaataaggccgttctttaaatttactatagctctaataaagactaaagatataactatctatagtatctttcttatatataagaagcttctagaatatatcgaacgcttaaaccggaagctaagaaagaaaataataccctagaaaaaagatatatacggtactatacttatagtaaagtaaaagttaaaagattattacgagaagacttattataactatagatttctctatagtatagtggctttacttactccttagtataagctttattatatagtattaataaagaaacctagagatactattctatactatatagcgccctttattataagccttagagttagaacggcttcttaaactattatatatagtagaaataagcgaaggagtcaggtataacgaggttaatcgttatctctacaagtataagtatacctagcttacttaatctaaaagaccgctaataatcttagcgactaccttaatactaccgcgtatatattaaagagagaataagagtaaattccctatactttcgcgactagctcgtgatttactctcagttctagctactagtataggagttaaaaggctatttaatagtacctaggatatttactattatcgccaaggatctctaaataaaactataatataagacttgataatatatatatactctaagaaatttaccctagagagctagtaatcgaatctattagattataggacggcggaaggggaggattaggaaaatctcgaagaatataaggtaaataaggagaataaagacgaagatatagctattagtaatatagacgagagcgaattagccgaagatacctatataagtcctactacttagagtactctaggatttgaaagtattaccttataggaacttctgtctcttaatcgaccgtaagatacaacgataaccgctattcgtctagacctagagagcgacgataaagatctattactacctctagttatatatctagaagagagatcttaaaaaagattattaggaaggataatagtacctttaagccggcttaaaggctataagctatattagtttatctgctatagagctataatttgatataatctccttataaaaacacttatcctaaactataaacttttaaaactaggctatgattctactatagttaaggcttttctgaaaagcggtagtagcatatagtctactcataccggggcaatatattgatctaaacaaataattttacataattttgtgctagctaacaaatccttctcttttgggagtcataggtaatttgggtacccgtatgggtcgcgggtcgggttttcaaaaaacaaacccgcccacgggtctgctgactaagacccgccccgacccgtggggcgggttttcgtgggcgggttcgggttttggggcgggtttggcgaggtctagtaattacataaagacaaacagtacgagcagtataacaaatgtaatgtggatccagaggttattagctccagcagatcaggtgcggcgcaggattgccattcccatttcattaggtagcggtatcgagatgtagtttcagccttcaaagcccagttgctagtattgataccttatcaatgagaccctttaaaaaaattattgcaagctttatttatgttaggatggtagtaaacaagaacgacattagcttaaaaaatttctttgaaaaagcgttgcgacggccatgggcggtcaggccttctttcatcggtcaaagtggatcgacttatcacttcaccatctacaactgcgaatgataatcaagttcattggcatctacggcatcaaaattggcgaaaagaaagcctgtcatgacgcttcatgaaattcaagcagaattgggattccaagtcgagctacccaacgatgagagttaaaagaaacggttatatgcggatctctcacctgtcccaacaaatgttacggaaagggtcgagaaaaagctacaagaacaccaaagacagagcctcttaaaatgccatattggccctgaaagtctgctttcagggttaggcgaggttcatgtatgtatgtttctttcgcccactctatttctaactcaacccggcttttggctaactagagtatagtcacttaataccgaggaagctatcattgcaatgcagcgttctagtgctacaggatattatgttttcttattggacgttcggttctcatttggattggaactatgtctccctttgacgggtctcgaggacattcgcgttatgataaatgcaaaggtatataggacttatcctgaattgaagaatttaacagctcaaggaaatacagcatcaaagaaaccccatcaatatgacttgcggcaactggggggcacaacttccgcacgaactacgattatatatttttcaactcgccattgaagaccaggagtgagaacaaacagatccacctcatctcctggaaaggctttttgcagactttattggaaatccaagtggatttggctttccgtcaagtcagaatactagcgctctgtgcgtcaacaagtggatgcgtcaggaggcactaccctttgcataccggtcattccgtttcagattcgacggtatggatggtttcatcagatttgcactttctatcggtcgaatagggcgcgaaaatgtggaatcgttggatttgtcttggctcagctatagcgagatggaagccacgtcgaaaccctaccgatttctatatgcatttgccgtctcttcacgcttgaagatgcgtatatctattgaagcagctgaaaagactcagaatcttatgtttttatttcaatgaagacattctttccatgaccccgtgcgatgaatttaaaatcgaccctggcatccgagagccttcttccatctcgggtctgagatctgtcgagatcaagggattgggcgatcagcctctagagtccacctctgtctctgccaagtggttgaaaccacggttggaggatcaaactcgagctaccagctaagatagactgctgaatcaatatatctgtcacaacgaaaaaaaacgcctgttatttaccactcggccaaaaaggtgcacactttcttagctaaggtaagtatggtgtattttatgcgtattcttgacttgacaatatcctgatgcctcaggcatcattcaatagtcgtcacatgatttagcatcatttcgagccacatgcggaaattgcgagtttccctatctcctgtttcgctgcagcatgtctcaacgcctaaattcagtcgataatggggtcccctttgatggtaccccgaccgcggattccaatatcaaccttgatgcctcgatcaattagtggaataacgtccctcccacctctagtgctatgctagctatgctaggcaagttcccgtggtacacacgaatcgagctgcgaggatccaaaaacttcttatccaaaatccgacgatcctttaccccccttcccgataagcgaaaatttggcctgggtgtctattgcggcgcaggcgtcggtcgcgtgacgaaaggcttcctcggcgatgtctgtgaaatggtggatatcgtcgagcccgtagaaagttcacacagggtctcaaggaaggagagttgggacagcggggtgtgattggagacgtataaaacgtcggtcttcaggattggaatccgcataagaaatacgatttgatttggacccagtggtgtgtgggacatcttacagatgcacagctggtcgcctacgtcccaatatgtcgtgaatttttgactggctctggaataatggttgtgaaggaaaccatctccactgatccactcggaaatgacatgtatgacgaggtagacagcagtcacaaggatggattcgaagttcaaaattatcttcattgccgctggtatgaaaggggtcaagtctgagatgcaaagtgagtttccgaagcaatatgaactcttgccggtccaaatgtatgccttgcggccgaagaaatgaactggatctcgagaatctacgtcacggcttcaggccgcgactcttaagcactctacttagaaacggacatttctttcgcaatgattaaaacatcccgcggtggtcgcatcggagacataatgcccttcggatcaacaaatctgcaaacaatgcctctggcccacgccgaaacagctggtctcgtctcaagcagcatgtcgcgcagtttgttccagatgctttcgcggctccattccacattaacaactgcgctccacgatcaaactgctggcgaaatgaccagacaaagaaagtacccttggccgtcgagcgtcatcgaacattaaggtcccgacctttgttcctcgatcgggctgctctgtaaagggaccatcaggaagagacgaatgcctctcgacaccgatatcacgaaacgagtgcactcatcgtgttcaaaggcagatgacggtctttatatgtttggaaattgacaatgaatttgctggcctttgtggggtaattgagacacgagtggggttgtcatgttggctttattaaatcatccaaccataatgggtggctttgacacgcatgggaatatgtggtaattctttgcttgtgattctcaaaattccaacaatgtttcgacgatcgtcgtagttgcgattcagacaattccacgtgggaaaccttacaaaagctcacgatgatgttcttgattctacactgtagtattgctgtaaatgcttcggcgttcaagcgtttcttacaaggatggtgcattcccaggacgaaagaaccaagatgagccggcctttacgatgattgggtatcctataaataactactgcatgctgaagcggtctgtcattaccactacgacgtatgcctggtgagtatgcagatccaccgtaactttaccataagtgatgattttgtgccctggaaagacaaaagaaatgcaagtgacatcaagatcaaagccgaggctgtcaaatgatcgctcgataaatagagtagaacgtgacagcattcaccggtggctatgacgtggtcgaatcggacttcagtatgaaaaccacttgttgtatgccaagggacgcgtcaactattcggcatacaaatccattcgatgctctgagccacccacgcgcaatgctgtaagctagacgtgaacgaaagccaatggtttgcgaggcgtggttaaaccagattaggtacctgtgtggctacccaatctagacagataagcaagtttgattgggagtgacaggatgagcttctcaccgtcactttgtgtttccttcgcctaaagattgcccctggactcgcgaaggactgacaggggagggtgtctctcgcctgacatgagccctatattcctgatgtcggatcataaagttgcacttctcgcctccccatttagccctcatttgagaaaaacttggccatggactcatggtcactgggtggctctgagcctggagcctatgtgagtcatcttcagaatacatctattgacctccctcccgagccgggagatgcgcccgcgagatatccgccgacccgtgaaatttctgcgatatccgaggcctccagctcatacatcactggtgaagatcaacagctagaaccatctaccgcagagtctgcatatctcgagacatccggaatttcgtcttctgctcttgaggaagttatcgttgcaaatgagtctctatagagtactatttgcgacgagttcttgatcggcgaaggcgggatgaatggtggtgactctagcacgaatctggctagtaattctggcgcagtgaacaataccaacaatgatgagcccgcgactcatgatgcggagacgaagggcggctgggaatctgaagaagcagagatgccttcagaggaagtcatcgctccttcgccacatgatggtctgtactactgccaatatgtgatatgtcaacaacggaagggctatgccctcaaatgtcaactgacgtaggtttcacgtctgatttcagttttcagcatcgcccagctgctaatgaatctcaggaaacacattcggacgcatgttctacctgtcaaatgttccgaatgcccatacgcagcagctgaaaagaaagacgttgatcgacatgttaaagctgctcacagaagactggctgagcaaacttgggggcccatggagccaattctatgcgccttgtgcaagaaggaattcacacggagagacaacgcccagaaacactacaaaacaaaacatgttcgataaatgaagcaggaaggatttattgacaggatccagagtaatgtattcatttttgtttttgcacaatggcatgctttatttcgagtccctgctttaggaagactcgcagttaccaactttgatctatcccatgggggaggaggattcgggttggaatccattggggttttgccgttacgtatgggtgaaaagaagtgtccacccccgaacccattgtatctgacatgccgggtgtatttagcatttgatgtcagacgatattttgacattcaaaaaaccgtgcttccagtggtaagttctgtatagcttcgatttaaagtcaatttgacaagtattggtagagttttgtgcggtttaaagtcgcgaattgcttcggcttgggcccaggtagatatgcgaccgctggcaaccacccacaacatcaacattggtgttgagaaattgaccagtcaaacttcaaattgaggatacggactgatgtgagactcacgggaaattggaagtcctagctattgctcaattcaattttggaaaatttagaccgttttacacacccggattgatatgttttatggcatctgtcacacacattaatgcccatatgtacagaaaacatggaacaaaactttcaccaagcccgcagagcacgcccattcttattcgcaaaagttgtcagattggcgtcagccccagtgaaatcagccgacatgcatgaagcataccttaaagctccaataggcgatagcagacaatacaacataccatttgacggagggacggagtgcaacagtgtgaaagttgggaagtctcagaaaggttggttaaaatcacccctggattatcttccacaacgatgacatttaatgttatagggatacgggtctagtgacgtaggtgtaaatgcaaatgtacgcaagggccagtaaccaactgcacatgagccaattggtaagggaaggcaatttggacaaatggatagtcttgttgagctgctaatagctggaaaagcagtttcaaagtgagcgtgatagtgatatgcagaggcacagaaatggggaccatgtggtccatcgaagagactgtgcgtgcagccagagtcatcattccgaaaatagcacggactgagtgtcatgacttggtccaccactacgtataagccttccgagcagcatttgatagcctggggcaaattatcttttcaagcactcggggtgctttgctgacagcacagccttgtttttattcaacagaaccattcgatgcaaaccaacaaagcattcagccaacgggaaatatggccgcaactaggaggtctccgagacaatggcctcagcaccgcattcagcatcaaacatactggatgatgcttctgtataaccgcaagaatgactttcgtactgcctctctatggtgcagggttatccaaatggtgatcggcgtgagagatcgttcgccgaaaagattataatcactttttgtctagttcgtgtaaaatggattggctggcgtgccaaagatagtaggagcatatgcttggtgtacatctggggatgcacgaagaaggtatgttgtatctcaatcgtatctatgtgaattgatattagtaactgccctagtcgactccgtagcgataggtcactgtggtgattttatgatccttgaggccaggcggaaaaccaatgaatgccccaaatttggtcccaatcataccaaggctgtgcgacctggaaagcaacgtcaagttgcacctagcctttgcaaactagttgtcgtgggtcgacattatggcagctcctccagaactcgatcttagtcccaggggacttggaattggcgtgggggatccagcatctcaagccaccgtcgtaacataaaatgactcatgacaaagattctatccaggcttaatgaaagaagtgggaatgaactagtagtggtcttgtccaacaagaatgatcaatgaagagcaaacgatggtccgccaaatttgcaatccatgatccgaaacttgagcaacgttgcttccggtttctcctgcatcgtgggcctcctgcatcgtgggcctcctgcatcgtgggcctcctgcatcgtgggcctcctgcaccttgaaccaccttagttatctctgcattaagaccaatcgggatcaatctccaccagcaatttatgagttatccacccacgcgtgctgagggtgtttagaaagatggaccgatggggacctagccgacagctcatcacttaagcttatatagagctgctttacttagcggcggctggcgcgctgacaatgccccaagtgggagcgataaagtttacgataaaaagaaaaaaaaaagcaaactttgaaccgtattttttgagatacatcacctctatttaatccctatctccattgctccatgcatgggtcgtagtccatgtaattaaacgtgttgggttgaacctagagtatgaaggcaggctacgggtttacaggacctacaagattgtgattggtagctgccaatattggaggggtcgagtgaggtaaaagtcctttgtgaaactaatgagactacctgtcatgtagtggtgatttgctagctctgcgtgcgagcagattcgcaaaattggcctgctatagtcctggcaaatcgcattccgccatggcagcttaccattggtgatgggagtgtgtgggcagcggtcaaaaattcccctcatctgcttcatatgtctattcctgcgctcattcgtgtatttgttgattcttgctgcagatagcctgaaatagaatgatacaaacctctaaagcagataggtctgcatgagaactgtgtccgtgctttgtcttgagaccagggaggcacctcttgactctgaagtgcttccacaccttttgtttctatatatctctggcttcgatcttgaaaccttctattttgatcctagtgtcatccgaaccttatcttttgtcatgtctgtaaacattcgatcggagcgactggccaagtattttggagcggttattcacggaaagcaagaaatccaggattcgacccatttcaagcgatttattgaagcaacccttgatcagagtgatcctagcattgttgttcagcgaatcatctcaagccaaagcgctctgaaagccttgcaaattggactgaggtccaatctcaccccggtcttcatcaacgggtataccgcgaagttgattcaatacttgaagaatcgcgaagtcaagctactttgtaacggccaatttctcgagcagctccttctgctcatcgtggagcctcggactctctggggcgcatttttggaggctttccgcactcggaaactggaagatcatgcgatccaggctctgtgctggttgatggcagagttgctttcattgcctccgtcttgcggggtggatgttagcgccgacgctcagactgttttgaacgatggatcgcttttctcttcgccctcggttgacatacgaaactcgggccacaaaatcaaataccgcctagagatgaaaacatctgcagccacctatcagcactctgagatcactgcaggtggtcggcatgacaatgattttggcgactttcgcttgacggccatctttcctacggccgatgagatggaatgtaaggagaaaccgttttatcgccgtgcggaagacatcgcgcagatgttcagtggccaacgcattgccggctatattgacaaccaatttcgtcttttacgagaagacatgctctcagagctgcgtgatgagtttcaagttgcgagaggcacgaagaagggccgacgatcggctttccatttgaggaacctctttctcacccatattcgctgcacttctggtaccccaagccgccttcgaccatacactattggtgttaccgcccagtctggtcttggaaagctgcagaatctctcagaagatcgtcgtaaggagttcttaaagaccacgcctcagtttatcaagcatcgtgcctttggttgcttagttagagatacagaaattgtggcttttgctacaatcgacagagatatcgatgaactggtatctgaccctccaacggtaatgctgcggattacaggtgaggaaccactcaaaaagtctctgctttacctaaaactctaccatgacgtggaattcttgcttgttgacacagcaatttttgcatacgagccaattttgaggtgcttgtaggcgagaatagaactgcctctcagagaagagttgtttctctacgaaagagatcagccagtgaagaatccaagtctagttccttagggtgtagtcaacaagctgaagaagggatacggatataatattcagcgcacccttcagacctcaataccagtgatactggactcttcacagctgcactccttgttggccggattgacacagagagttagtcttattcaagggcccctaggtaagatcatacggatcctcttatttccactacctcagatacttaacagacaatatgacctccaggtaccggtaagtcattcataggggcccttctagcaaaggccgtttgtgacaacaccgaagacagaatcctggttatgtgctacacgaatcatgccttggatcagttcctagaagacttactagatattggtatagatccttccgccattgtgagactaggatctaagtcgacgcgacgcactgagccgcttggattgttcaagcaacattcgtcctataggaggaattacaccacttagaacaccatcaatgcactcgagggggatggaaatgagcaaaaagacactttgaatgattccttccaagcttataggaatctcacagctaatactacatctatcttgggctatctggagtttgaagaaccagggttctttgcggctctgaccgtaccagaggacaaaaacggcatgactatggtcaccaaaagtagaaaaccaataagaaaagactacctctatgaaaggtggattaataacaaaagcctaggagtatattctgatcttcttcccgctcattcccatgaggtctggaaactggatcagaaagtacgggaggagaaagacatgtcatagagaagagccctattgagtaagtaggcagagactttggcagtcagaatagcattgttcgacaaatgccaaagccgacttggtgctaccttaggcaagaaaaacagagaaatcttgaaattaaagtggtttattggttgcaccactacagccacggcaatttattctaaggacattcggcatacttctcctagcatcgtgcttctcgaagaagccggtgagattctcgaagcccatatgctcaccgcaatgacaccagagactaagcatttaattctaattggagatcatcaacagctccgaccaaagatcaataactatagcttaagcacagagaaaggggatggttataacctgaacgcctcactcttcgaaagacttatataagccaggtttccatatacagctctaagcaagtagtataggatgtgtcccgagatctcaagtcttatacgcaatctcacttaccctagactagaggacaatcagaagacgaataaccacccctagctacaagggctacacgacagagtgatctttttctaccatcaaaattccgaggacatttctactaaggtctcggaccaacatgataagagctcgagagggagtaagacaaatgtgtttgagacagagatagtcttcaaaatcgtgaagtacctcagatagcagggatatagaacaaataagttagtcgttttgacgccatacttaggttagctgagtctactgaagcagactctaagcaaacagaacgatccagttcttaataacctggattcttacgacctcgtcaaagcaggccttctgtcctaggcaggtacttcccactctaagcgctaaatcaggctgtctacaattggtgagtagggagaaaagggaatagttataagaaagagattaacctaagaaaatagacaatttctaaggagaagagagtgagattgttatagcttcactcactcgcagtaataagactggagatataggatttatggcagctcctgaacgcctcaatgtccttctctcacaggcccgaaatgtcctcattctagtgggaaactcagagacgttcgtctctagccgaaagggtcgaaagtactggaggccatttattaatcaaatgaagtcagagggccacctgtataatagactacccgttcaatgtgagcagcatcctcagacaaatactattcttcgaacagcggaggatttcgatagagaatgtccggatagaggatgtcctgctccttagtaaattcacaaggaattttacccttactaatatcctaatactaactctttcttaatagcggtatgaaattaagctgtggagtatatgagtgcccatcaaaatgccaccaactggcggaccattcaaatatgaagtgtatcaagattgtggaatggaaatgtcctcgaggatattgtctatctctttcatgttcttaggcaaagcgctcatgtcgtttctatatccaagaagatgaggtcaaagagcgtaagcgcaaacgcgatcttgagttagagagagaacgacaaaggaagcagaacgagtacactcaacaacttacagaagcctaggaggaagttttctatcttaggcatgtgcggcgcgctgaattcgatgatatggaacgcgcgagggtgcttgaatagtaccgataggaaattgtggggttaaagaatcaccgcctaccagtatctcttcaacgtaaattgaatcttatagcgactaggagtatatctctaaccatcacagaagcaaacacagaataaagcgtatattccgttaagaaaacaatttaaagccgtagtattgagtctacaagtcgacaggtaataccgctgtaaaataactcgtcggctaaaagcgaataggaatatgaaaaatagttctccaacgctcaaagccaggcgatcgacaatttgatagacataatcggactcgaaacagtgaaagcaaagttcttgtctatcaaatggaaagtggacgctgctatcaggcagaatattgatttgagccatgatcgatatggatcagtattgcttagaaatccaggaagcggtaagacaaccattgcccgtctctatacaaagtttctatcctccatagggatcatccccagtgacacattcatcgagatgaccgggtccagactcacgaacaacggtatttctggatgtcaaaaaaccatcgaaaccctcttaaaaagtagcggtggtgccatattcatcgataaagcgtatcaactcctcagtagcagtctcagtggttcgcaagttctagatttcctcttagctgaagttaaaaaccttattagaaaagtggtttttattcttacaggttatcaacgaccgatagagaagttcttcgcgcataatccagggcttcccagtcgtttcccgcataagctttagtttaaagacttcgatgacactgagttaaggcagatcttggtcagatacatcgagaagagatacaggaagcagataaaggtcgacaataaccttagaggactttactatcgcattatagctcgtcgagttgggagaagacatggctgtaagggcttttccaatacaagagctattaaaaataccttgaccattatcactaagcgacaagctgcacagctcagtcgagaaagacgataaggtgacagcaaggctaaggacttctttctaagcaaggaagatctgattggccctaatccatcgcaggctctgaaattatccaatacttagcagaagctgtagaatatgattaggttagacgctataaagaacacagtagaggccattttagataccatacaatacaactactagcataagctagataagaaaccactgattaagtacagtctcaataaaatctttttaggaaaccccggaacggggaaaacctcgatcgcaaagatctacagtcagatacttatagatatcggattattatctaatagcgaaggtatgctatctcccatgctctctataagttatactaacaatcacagtcattataaaaaacccctcagattttgttagcagcgttatcagagtccgaacagaataccaaagggatactcacatctacaatagggaaagttctagtcatcgacgaggcctatagactctttactagaggtatctcggatagggcaggttcccagagtaactcatacaggactgccgtaatagacaccctagtagcagaagtacaaagtacacctagcaatgataggtatatcttgctcctaggttacaaagaactcatagaagagatatttcaaagggtcaaccccagcctcagtcgacgctttccaatagaccaggcatttgtctttaatgacttcacctcaagtgaattggatgctatactaatactaaagcttaaagaacaaggatttgacataaccgatcgtagccgctacatggtattagagatacttaagcgttctcagagttgcccgcgttttagcaatacaggcgaaattgataatctactcaacactgccaagatacagtgctaaaagcgcatctcatctagcaaaggcaccggctctgctccagattctatccttaatgctcctaactttaacgaagactttgatcgcgcagatagaaaggaaagtgttataaagatatttaaaggcgtcatagggtgtgaaagtatcgttaccaaattagaaggctatcagaaaatggttcagagcctcagacgactaggcttagaccctcgcacacagttgccatttaattttattttccgcggtcctctaggtagacaaacctctatttacagtcttttctccactaaatattactgacatataatccccctttaggtactagaaagacaagcacagccagaaagataggccaagtctactatgacataggcttattagcctcgagcgaagtggtcgaaacctcagcgacagacttagtcggtcaatatgtaggtcagacaggcccgaagacccagcaggttttagaacgtggccttagcaaagtattattcatcgacgaagtctatcggctcgctaagggacattttgccaaagaggccatagataagattatcaatagtattaccaagccccggtttactcaaaggttgattatcgctctagccagctataatgccgatatcaatcgtcttatatcaataaatccggggctcaccagtcgtttcccagagtctcttcaatttgatccattgtcctcggcagactatgtcaagttagtttgcgagctcttgttaaaagaaaaaggaaaaatattagtcaaatcacaagcccagttcgacctggtctgcttaaagagtccaaatattaactttatgaaggaaatgttacagcgctttgatagactttcaaagactgcaagttgggcaaatacacgagacattggaactctcacaaagacaatctttggcaaattgctacagtcattccacggaaagaaactagtgctaagtgaagacatggtacttcaagcgttcgactcaatgatccttgagcgatctagccgagaagtctacccgcaaaagactccatcaactacaatccaaacgagcgataaaatagacctggctctacgcactcagtcgttgagcaaccttgctaccacactgaaaagtcaaggctcagtcaacaaggatgtggcttctagcaagaaactcgacactatgggtcccgaaacagacagattcactaccaccacaacgcgagatgttggtgttacggacgatgagtggtgtcaactcgaaaatgacaaacttctggccaacgctaaagagaaagagtactcatgcttgaatgacgaagaagaacaacagaagaagaagatattaaaattaaaggaagagggggaaaaagcggcacgggagctggaagatgcaagagggaaagcagacgaagatgccaaaagacgccacgagcaagaccgactgcagcatgagttagagcgcaggagacaggaaagattcatggagaaactccacaggcagcaagaggctttggctgaggcccgtcgtaaggaacaagctaatcagacgaaattgaaaacaatgggagtctgtgtcatggaatatcgatggattaaacaaaacggaggatatcggtgtgctggtggttcccattggggtcggatgcgcagcttggaggttcctgatcttgtgatattgaagcacgagaaaattatctatttttagtagtcctttggaatttcgttgaaatccgacaaaaatatgatgattaggggcatccattggaaagcaatccaaccgatagcatggctataagctttagagctttgaagcgcacgatatcggcgctgtttttccatatcgacactcggcaacgtcaacttcgaagtctgccgtcattatcgtcggcgatatatcgtcaccggtaattggacaataagagaaaggctcctgacgtaaaggaatttttcacgaagagaatgtaagctgacttactcttttgttcggatcatgcgcttccgttgtgtagtcttgcgtcgtgttgttgccgtaaaatgcgacctggtatttagatatcttctgttgctctccagtcatatcaattagctctcctattgcaaagtacatgtccaattctttctatgtcgcttccaattccctacgcacaagtgtacatatgtatctacatgtaagtatctatactaatgcatattcacatcattgttttcgttcctgccaacatgctttgatattaccaggtctattttacggctacgctttccttcttccgttatgctatatggcagaatatccaaaggtcacatgggttcgatttcattctatggttttactctagtagattcgaggtgttcgagaaaatgggacgcgtgccacgacctcttatttgttgactctaaagctcttccagaaattaaccaagtcgacatatgattcttcaactcagtttccactgaactactggatccacgtcgacagtgagctgtggatagcgagatatatgttcattgactccgcaccagtcgcccagtgtacccattccaaaatgtgtacccagtggaaacgccttattttcccctctagaagagttaaaaatacaattcatacctctgagctacaacagtccgcagtgctggtctcaaaaagggtttggcagtcgtgagggtctgagagtcttaggattcactacagttccttgggagctctctcaagactccatcatccatgatgccgtacttctcgaaggacactctcagcctcgtgactcggacaggtgggtgctattgctggctcgtcgaatctcagaagtagtaaagagtcctcaattcctgttgtgcttgaattggatgagctagaaagaaactccttttgtcgactttcaagaatcaggaactatcaaaggacttcctggacttcagggattttggcatggcaattcctccaaagtaatgttgcctttgctggcagcatataccctgtgctggtaagatgtagtcggcaagtaattgacgagagtaatgatatcgtctctccagacacgagagacttttgcttttgttcaagcccagaatctttagcaaggctatgcggggagacatttcggcggcatgtaatgaatggatttcgttccgcgtggaaatattgcgagcgatcttcgatatctcaataacccacactggcggcctctgaggttagcgtatctctaaaaaagcggcagcgaagtgataaggaaaagaatacgcaaatcaggtcgccactggttgttgcacacagcccctccttgaattcctgggaaaccacgcaagcccggtgttccgtcttgcccaatgttcccagtgcttccgatcggctcttggtcgcccggagaccccttaggccctggaggacctggaattcctctgggtccatcactaccaggcaatccctctccctttcgaggtccccgcaagcgttgtctgcaatatagacaccatccgagagcgtttgccactgcaatcgcaacaccgaccaaagcgcctattgaggcagtatggctttgttgatcaggtctttctggttgctcagaatcagggcttatagtacttggttagtaaagtgtctccttataagaaggaacagagccaagggtcattgtcgtcatgtggtgcgatccctagggatgggtagagtaacgatcttgaaaagcggtaatcttcatgctatagtttgattatccaaaacgcgatggcttctcaccaggaaggggggggggggttcgattgagaaggcttcgcctacgaaatacgctcatgatggtggccggggtggtatctgagaagccttacgtgggcagtgtatgaaaggatatgaacaataggtaggtatgggccctcccaaggctctgcttcgaccgtaagaaaagggagtaggactccagctaaattgatgttttttcatatgtaaaaaaagaacgcagaaaatcacaaacgttcgaagtggccaggcccagaaagatgagtggatatacacattcgacaaccaggtcatccaattattcaatcatggagcatttgtagaatacgtcagaaaactcttccttcaacttcgcaagcttcgctggtgcagtcagctgggactctatttcctcccatttccgcttccattcttgttgtctctcgacagaagaggttggccgttggccaaaacagtcgccttctttctgcttggctccgggcgtagagatgtccaacgattcacattcgttgtgctccacagcgaacatgctgcgagcatacttgagactccatttgggttgtttcccaagattgaccaacacgttgtagtgaatcccttcggtttcgtggtgctcgcggcatccgtaatacgtcgccatcgtaagtttgttgcgctgtagcatatagctaaagccttcttctaattcatctttcaattcaagagagcattgtgaataggtcagaaatacccatcgatggtgcaatcgtgcttcagtgtttactggattttcgagggaaatctcccctttcgggaggaagacttggataccctggagagattctccggctgaccgctcttagagaccgctttaaatctcccgaacattttgatttccaaattgctcatacttcgatatggaggggtaaaccttccttttatcttattgataacgtcgcgtggcgtcgaggcacgtagtgccaagaattacccgaaagggtaatttattaagtcgcacagggtccccgagggtcacagttccatgccaagaatcgcctgtttagggagcggtcagaccacgaccggggccttcgggctcacttacagtacgctgtcccgaccaatggtcggaggctcttatgcggtatccgtggatccttcctgtaaaaagattacctccgaaggggaaattacgttgagtttcaagtctcaatttttggggcggcagtgttataatggagagtggagacactttatcccaaaaagttgtccaatcaagtctgaagattgtggaggtacggagtatacagtagctgcgacgccttcatggcctatccccagcaacagcgcggcagttattcacatcgacggtgtccccggtggtggactatgcctccaattcctggatgcacacttcaagaataaaaacatcgggccgatcagcagagtgcagagggtgggaacgcaagcgattattgggacattatccacagttgcgaccagtgtagcggaggcggaggcttacctcgccacggtgtaacattggctctggagacgagctatgaagatgtgtacagacatgcacaccctaccggtaaccaatctcctccacaggagtacagctcagatcagggaattcaggagataccatcgttcaccattcaccgttcaccattcaccgttcaccgttcaccgttcgtcattgtaccaggtcgcaaaagcgctgaaaagtatcgacatggaaacactggcagccatccatccattcaaattggcactatgggtgaagcgagttcagagcgatagtcaagatgtaccggagacacagaccgaagcgggcggagttatgcgaatcttggtcaacagatcagcgggggaatgagatggtaggatttggcgtggcgagtgaacttaaatgacatctgagatgacgtacaccaaagacaatcctaaatgggctgcaaggaggcatatcattagctaaggcgtgtatatgtagatctgtgatagttgccctttgggttcagctgccgggcgttattagattgtgtgtgtatctacaaaattatgttcccgcttgactaagaggatattggatacgaccatttgatctgatatcacagcagtgatttgtccaatttgatgacaagatggttatgattccgcacaaaatagcaatatacttttaatgagttaccaatgccagcacctgaaaatttgccattttatatcaccttccaaatggtcacatttcaatcaactgtgacaaacacttcggattatcgaacggaccagaaatattcccactgcagtacgcaaagccacgagttggtgttgaaagcgtcacgcagatccggtctggcttggtgctttagctgctattcttgcgaagctatgacgagaatgcgagaactaatagtggccgataagaccaagcactgagagactataagataaaggcaattatctacgggcaatgcatggaataatgaattcataacatgtcggtacttgttagagaactcaaatgattatgatcccatcggccgttgtttccattctccatcataactcggtccacatgaaacaatccttgccatgaatcacaggatagagaatttctttatattgtaccatacatgtcataatgctatgtagcatgtcaaacacaaccctatgaatgtgttctcactactaagtgtaagctatacgagctccgaactactaacaatggcttcggtatttcatttgcaacaattacgttcctacaagcctgctttcgagatgatgtgtaatgaccccccgagatgccagtgagcgatttctttctcaacgtatctgttgcggaggcgtttatttgtctaacataattttcaaagtgcgcatatctccgttcatacaagccaatctaatgcatgacatatattcatgatcactttctggcagtagtaagtactgctgcaaaacgatatttagaatcttccgaccgtcatctcttgttggattgacggaagccaatgcttggctcatgccttgtatgacttggttggcatctgggcaatccatgcggagcgcttcgaatttctcgcacatgtgactccttgaaaaactatacatgctctctacagctaagcgtaggatggattggttttcgatgtctcggatgctccactggaaatcaggaacaagaccagcgagcagttccaccaagcagtagtgttgcccctttatggcttttgacagggctgtctcgccaaaattatccaacagactgacatcagctccatatttgatcaaaagtttggctgtatcggtattcttggataagacagctgacatcaaaggggtatttccgcggttgtcaaagctattcaggagcacttgcccatgttcgggaatttgtagaacataaccaagaagatcgtcatatgcatttgaggctgcatagtgcatggctgatgatcctttcgtattagagcccatcaaactaattatccaattagagttctgagaaagaatgtagcaagcatcatgttgtctcttttcatttaaagcggtttcgaacgctgctgtcagttgttccgaaaactctagacccgggacagtacaattcagaagaaaattcatctttatagcaatcccttacaactttagttgttgagtgttctatctgcaactgggggagatagtcgactttaatagggagcaagtctactttcgctcagcaaaacgcctcttttggctaaatatgtagctttagaggatgaatgagccatttcaggaacagccgtaaatagaacgatgtgaatttgggtaaacgtctgagactcagacacgtattgaacactattttcccataagggtaaacggtgagctgctccagagtgaaaagtcgcttcggagagttgacaactcggtaaagagccaatttactgcatgaggatttgtgatgactcaaaaatagctcaccttcgcgtcaagccctaaatcacctgggcacagtatatcatcagtctgaaaattttgtaatcaacgcttgagagtagccattctgaataggcattctcattatagcttacttctgagctctatgaaacctactcatgcattttggagagataagaaacaatatcaatatccatgtgtatatacagtacacacgatgcttttgtaaagctgccctgttgactaggcgtccctgaagtgtagttcgttccgaacagggtaatatgaaatgagacaagctaagcacctaccgaatagctagtgcctaaagaacccagaaattggattcaatgacaaatatcagcttcgaaattggtaatcatgcgatcgggatgaaggtctctgagatgaacacagagaaactggagttgaagctgctgtcgaatatgacttcactgtatgtatgtcagtaaaatggtgacaactttgtacgtatagattctaacttgtagttgatgtaaaggcgaaggtagctactcaagttttccacaaaaaacacacaatttaattgttcgcagatctcatttaccagctgctttgcccgaatcagtacttattagctggggtatggccatgcacaacctgctgtcgtcaccgctgtgaaaccagctgtatacaggtcctgttactatctactctggttgtcttcaaacaaaatttcgcaccattttactacatcattagttgcaattaagacactgaggcttatttcgccaaatccttggtcaaacagtcaaagcaggactgcagaaaaaatagcttaatcacatgatgtatagagatcaagaatagatcaagaatagatcagaaaacttttctgtcctatttccgttatttcatacttacttcatcaatcccattacttggatggactaggcatagatgtattttacgtaaaagcaattgaatattgctatttttggataggatcaacgtaaataatgcgtattttaattttaatgttcctagcggccaacgcctcggtgactcaatcaacgcgatatgcgtcattaaagcgagcttcttcaaccacccactctatccgtactcaatcctctggtaatttgaatgatgaaggggagagaagtcggatatatttagccaacatcaaaggaaacaggaagtgtgagatctcattatagtagggcgtcgccctgatgtaccaaaacaccgtacgccctcgcctgttaaaggatgcgagaagtctttcgccaatcgctataattagcctcgagtggaaatcgtaaattttcgagcggtgtagcatgatgcctttattttacacaggagagtggacccaaagtttattgagtagcctgattctgatcaagaggtgagtgggcttgccacaacctccctggagagcctgtgcccctcgcaagctagctcatatgagattgcgaaacaagtagattgtgaaggcgttttagctgctaatgtacaaaagttggaggttccaagccgctcgcggatggtttgacgatgtataacgtgcgctagtttgaaaccacatccaccgcgatgaaaacaatcttttattgggcctgatcgtttagtagttgtattgcggtcacctcatcccatccgagatcagtatcaagtctttcatttggtttaaatttgtattccgccgtatggtttggatttctctatttctcgaagccaggtttaaatacaaatttggcacgcactgaacagaatgtgtcaggcatacagaatggttaccgttttcttacagctactttttatgcggtggctcattgggttgctgtggataagtcctgtaactttgtagcttgatgattatttagaattcaagttgtttacatcaacacgttgccctaaatgtacagtagcgaccgctttcgccttccatgtcgaacaacactgaaaagcttttccaaactctaaaaacatgctgcgctaacccgtatatagttatttccgtatttgagaatccgtcacaagggccggatggtataatactagacgcaaagaaacggcttagtaaggtatctgtattgtattgttacggttcatctccagaccgaccctctcttcccctcttctgactaccaacggcagacctcagggaacttcactgaaggctcaaattagaaagaagctggaaaacagcatgcaagtccctacggagatatacgatcatgtaaggcctaggattgtgtcagttgatcttttcttttgctcggtgcttaacattccttacagattgtttatcgtgtttggaacgtatacaatgagttcttatatttggcagacgatgctaggaaatacgcgacctttgaaggcagggctcgacgggacttggcaaacctgcgccttgtcaacagggccttctgccgcagcgcgtcaccttggctgttccggcatgtcaacgcagagtgtacttccacgctggtgactccacctctagagcggcttatacaattatcgaaaagcccttatgctacatgtgtttgtcaaattgacttcggctttaaggaaagccttccatcggataccagcacattatatatcgaggccctcgcagaatggcactccttccttctggtcaaattcaccaatctcagggcccttggatttcatgaaccgcccttatcgttaccgcaagcccagaaagcagtgtatatggagatagctatctctatattgcgttacgtgccgcttccaaacctgtcagaacttgaagtcagattttctattacccacgactttggacgtttctttccgaatgaaatcaattctttacaaatccctatcgaagacattttgcaacatcttcgacacctagaactatgcgtttgtgcatacacggattcggcggatcagaggcgcagacagacgccagttttgccggaatatgctgctcttcccaatggcacctatgccccccacttattcagaatggttgaaaatgcgccaaaactcaaatcactgatattgtctagtgtcaatattttagatttcgactctgtcacctttccatctaccgtttgtctagagtctcttcatctaggaggggtttccatctcatctgacgttctcctttcgcttatcaaccaatctgcgcataaaatgaagtacatcggtttctggctggtgaaattaaagtctgggacatggcagcaggtgctattgcaactgtgcaagttaccacgccttctcgatatcaacatcgattatggtggatacacattaacaggatcgagctctcatctggccgacaggctatttccaagtccggagtgccgtccagatattgaaacgatgcataatcttgatttgattgaacttggcaatctacagtggcaagtcaattcgaacaggatcgctatgggattacaacctttccccgatacagactatcaacatatcaataagccatcactggagtttgaagggtgatttcttgtaaccaccaagaagcttaaacagacagtgtgattttagtcaggttgaaatccagggaattgattttcaattttcaatagcgatagttcagccttctatgcttccaagagaacgcgttcgtgggagtggatatggtaggcgtacgacaaaagtaaccgggggtgggaacatattgtgaatgttcgtccttgttggccgtttgtggagatcttcaagtcttgcaaggcagatacaatcagacatgaaatggaaaagcaatgtactgccttttgttgaataataatggatcgtcagggaagggaaaagaagaaggagggtagagagagagaaactatctactgatgaattagatctgtcccatatgactgccttaggcatcgggaacccgacatcaagtgaagagatgcctaagcagatggaaatggaagaggttagccagtaacctctagtgtccaatgagttccaaagccatggcatgattgatctgcagtggtggaggttgtgaataagccttactgtcgaaccttgcctactacactgactcggaactgactgctacaaagtaccggctgtttgcagtgatgcaacccgcaagattaaaaatggaactgttgacatattacctatctaaagacttatgcttgccgattttgtatcgaaccttccagcaagcccaaacgtctagtcctagatctttgtattttccatactggtattttaagctcgtggtatttattacctggttaggtacacatcgaattatttgcgcactattcatccatggattagcacatcatgtgattatggtttgatagaggatccctgtgttcccaacatggaaggcgataccggtcgctactgtaaaaccgtttcagaatatagaagatggccttgctatcctgcagacccgatcaaaacgagagaatattctatcaagtatgatctaaccaaacacagagatctaaaatccactgaccattactgttagatccgaatgcaaagcccctcgcagagcgacttacaggtcttcctcttgctttggctaccgccgggacatatcttcaacatagtacgattgactgcgaacgctacctcaaggagtatgagaaacgttggaacatcagccgtcgccgaccattacagctccaggagtatcaggagcgtacactctacacaacctgggatctgtcatactctcgcctagaaaaggaagatccagacgcagcggaattgctgaaattacttgccaatttcgacaaccagaaactttggtttgaactttttcatgccggacttaccgatagctctcccgaatggcttcatgaagtgatcgcctatgacgtaaattttaacgacgtgatggcagtcttggttagatactaattacgttatagtggaccttctgttggatgcccggatgcctaaggcatcacatgtaaatagaacccagatagtttgcctgctctctcgtcctctctttctcctcttcgtccaccagaatacatacagtgctttctctatgaacttacacgtattgtatcaggttatgagcctcttttgctagttggaccactagcaactcttttctctgaagctattttcatctggagacttttgacgatctgaccccacagtggatccacctttgtacgtagtatactacacagattcggatccagccaataacatccaggaaatccttcgagccctaccggtaaaagctccgtttagtcatctttttacatcatctcaaactgtctcgtccaatggagacagcagtcctgggggagatagcaacatccgtggaggctactgtatacttggacaatgttatgcataattctatcctataacgatatacgaggatggtaccagagcaatccttgcatccctcatggttatcaccctatgcaaaactctacccatgcaggattcgctagttggctatatctgcatgatgaattttcagtatatattcgcatttttaccagaatttctgtctctggtggcgaaaagtatgacctaccaatactttcaagcatgatttcccaacgctacgactaccgactgtgttttattttcattcttccttagtacggcgataatagatttgagtatgtcggatatacacctcaccgtagttaaatctttcggccgatgtctcaggtttttggaaagccttgatttcgtggaatcatttttctaaccctgcgagacttcgtttctgggattttcaaaatttgctactgtgaacctgtcttacttttctacaaaggaactctactacataaattgatcaatttctagaaaatactgacagcgtacgtaaaatctgattatcattcaagaatattgtgagtgatacgacccagtatttctccagaccatcttagttcagatccatctttgagtttattgcattgggactttgactgtctttggagatctacaaaatgccgtgatacttcgtcacctacaaggtgaacaacatagttcgaatcttgtacaggagctttgtcacaatgcgaataacacatcaggggtagggcgatgccgccagtgtcatgagataccaaagagcccgggtcgtctttacttgaactgcagggttctagtatcaatcaagtaccaaaatgacgatcggagaagttgtgagatggaacagttgggatccacagataaatcccagcagagcaaagatgacacagttcaaattgagcttgttttggacacttttcagaattgaagtgaagagaaaacccgcgcccctcaacacctgctcagtccgacgtttggcacctttttggccaatactgtctgtattggaagggaatgcttgctcttctatcgcattagtcgatggtaaaactgcatcgtggtcttcggttgtcatactaccatgcgctttctgtgggtctgccttgtggtttgcttcccgtacggtgtcctcagctgggggacttttcgaagtgcgacttggcatatcattcgcatgaagccgatactctccatacttggcagatccttgcggggattgatttggcaggccaacttggcacaaccgactgggcataggctcgcacaagtgcctggcactgagcctagcatcaaaaatacggttgtgcgacggtaatcccagtgacggcaggatagaaaaatcgcgctctgtctctacactcgcggtttggccgttgatgaccctctgggacgacataggcgaacgctgaaaaggcagctcctgatccgtctccagaggaagatcgaaataaagatcaataatttcagacggcctcaaaattgatgaatcgggacctgctggagggaagtcttcatgtacatttagactacacccgagaacaatatgttaagataaaagcttaccagtgggcgatgctttgatctcatgagttatttttcttttttttgccgggggatagcatttgtctgcagaactgccagtggggctgggaggaaccatgagtttccacttttccagagcaagctgctctaatctatcaaatttgcagcagcgagttcagtttatatgctctgaggctctattcaagtgcacatgagcggccataatccatttctagtttttctcaagcctatttatagaactatatctcactatggcgtgactaggtttgcctcatgtatcaacaaacaacccttttcaaactcaaagccaacccagtttgtcgaccttgctggaggtcctccccagatacatgccacaagaaaatattatttgccaacacacgctagtccacattgatgggattgggttttccggagcactcttgccagtggcctgtattgattcgtacgcagaatgacgagagttttcagcggggtgtgtttattcacttgtatcttttgacatagctgctaccttgatatcctattttaagaattgtcgtcccttttcgtgagcaagcagttacccctagtcatgcaagtgccgcgattggatgatcccattgtttaacggtatgttatctcctgaaacaatctacgtctcaggtgatattgcaactagcatttggtctgctattaaatgacgaactgaggaagtagtcaaataccactaggaccattcgggacaggcttattcatcgttcacccaactcccccttgtattagtataggattgcgcgcagacttggaaatacggtgttgtagcacgccgagggtcgatcttcagcgacagtccattggattggaaatgctccaagcggcaaaccagtcaattgctgtgaccggcgataaggtattgaacagtgtcagcatggacgcgactctgaaaaggtctatcgctaatgccgggcttcggccgagccaggcttttcttccaacagatgcgaacgctcgctttaatttgtttcggctgcctttggtaccgctcggcgactgatcttttgtcgagtcagtatttgtccggcgccaaagccttcatcttcttcatgctactgatcgttttgcagccaagttgcacatgacatcaatgcgtgacacagccatttcgggtccagcactgcggtatgcacattcccaggttggatgttatctttctaccgaaaactacacacaaattctaggagttgagacgcgccctatgacctacgttcaaggtcaccaaacagacgtttgtcgagttgtttatggggaagagaccttgatcgtgcctttggtgcgggatggggaaccagtggcatttgggtgtggacaggtttccaccgcttgccatgtttcttcatgtgaaaatacccagtgaccattagcaaaagcatcttcaaaatcgtgagacagtccttcttgttgactcgcagtggccaaccaatcttggagtttgtgcaacatattcgtcaccttcatgcctttattcgcattgttttgatcgctggtatcatccaggctgaatcggtttttactagcagagttgcgcaagagctctcgcgattcccgcgattgtcctttgttgctctccgcctgtcagataaccaattcaccggcacagcgaacaccgataccggacatagactgttcaacatcgtgcacctcgatgacacagaagcgggagcatgatgtcttgtcaagattggctttcttgatcaatcttgtctggtaaattcaatcgtgatggcagtttctacttcagcatggctcgaaatcataagctccgcttttcagtcgcagcataccaatcctggaaggtagagactgactcgagaaacacgcgtcgggctcgctattcatgtatttcttgattctcagccgcgacggccgaaaatttgcgcgtgatctattccgcatggagttgaggtagacacaccgaggagcgaatatcttatcctagtggtgcaaccttgggtaaatctattcgtgtacatagtcgaggaccctaggcgctgggtgaattcacagcgcagggacaagtcaaccggatgggtacatctcttagctgccaaggtttgaaagaattcaccttttgggtaatgagctagcctaataggtagcccatgcggtctggggatgaagtctcaaagaatccccatgaggttgagacttgaacttttccacctccacggtaaatctcaatttctagcaaggagaagtcaataggaagagcgcagccaactgatctcctgaatggataatcgcaagtgccaccttcaagtgttgtgatatgagctgttgcagatcagaaatcaagccgcaccgattctatatctgaatgaagtccgaggtgtatttctataggtgcaaccatagtgattggaaatcaacatggcccattgctcgatgtataggctaatatatcacgctggattaacaactcaactaatatctgtggagcacagcatcaggcaaacttacagctgacgagaatcttaagcctatagccgagaaaacaagagaaacctttccttcattcaatcttacaaaaatggagtgtgttcttttctttttttttccccttcttgaatagtattagccgttcgacagcgtccactcctaatcagatccagttactaatacccagatacaatcagcaaaaagggaaactagaccatgctcagcgggcaagagcaagtcccgtcaaatatccaccccacctgtagcggaatcatcactctcagcctctacgctaacctcaatggggtaaaagggaaagccccgaggcctgaacttagggtccatatgattttctcggacgctacggccggccccaccttgacggtcaagcattactcgtagctcttcaagggagagattagccacgcccggaccgaggtcggtttcaatgtcaacaatggttgaggtgcctcccgctgtcgagtccgcgaagcccgtctgcttaccaacactagtagcgatatcatttattaggccccccctaacggtgtcgatcatgcgtagcagaacattttgttgatgctgaaagcgcatcgcggcattctgttcgtgcgtgcggacatcaggaagtcgccagttcagatatagcttttggtgagaaggggggctcgcatagcctcgcggatggcaagaaataaacatatggcataaatagcaggctggcttgctgcatccgatgtatttatttttctcgttgaggaatctgccacccgtctgctcaaagtgatcgaggactaacagttccgcatgcacgcgcgttttgcctttgcagacatccttggacagcagccgatccagttccttctttgagtagatttgttgcacctgctgcaggaatatatcttgtttgaccggatcagagaaaatacgatggctgatattatcaatgtcgcaagtacgggccaaaagagggatttggttctcccgcgacctgccaatcgtttcgatacgtaagccacgcgatagctctaagcgaagcctgatggtggcctcgatcagtcgtttacactgagccacgtgcttacccagtttatagagcaggttatggagttgctcaaagttatgggaatgctcaaggcttccagtggtgtgatgcaaggctttgaatacctcccggtcccggtagctggagagggccaggttttgcatatccttttcttgaagctgtaaaccttcctttgaaaggtgtgttgatatccatttgcgaaggttgatgatgctgtcctgatctactcgtggtggtagcgctttatcagcttttatgtccagtaagagccgctctcttagcagacagggctgcgtaccttttaatttaggctcggcattcaatcgtcccatcaccaaggagaccagtttattcacctgctgatagtattcgaagatctttggggcgttgaggcccagcacgtggacagtcaaaattttcatcacctctcggccctcttttgtgtccagtcggactgtaggattttcgataatccatgaaagtatgatgaggaccttttccagaagagtgacgaccgccgtatcaatgccatcgttcgcagctagcagaatcactatcgcatcgggggtctgttctagggccgccgcggtgacgtagccaggccttttccgatacgcacatatataggctatggcgtccacaaaggatcgatagcttttagtggcacttaatcccgggccctcggggaagatatcacctggctttattcgatccccccggacttcgcttaggattcggagcaagcagaggggctcatagagcaatcgtaatcttttaggctgatgttccatcagcgaagcctctggaagtcctccgctcattgcgtcctgctcgagcatttttttagaataatgatcacaagcatacagagtgttctttacgtgtgaatgtgcccactctaagtatgacgcgcatatatataatctcaagttgattctctcagccccgttatacttcttctgactcactgcgcccgggcgatctcatcgtctatctttgctgcccaacgctagccattattttgttgttcttttattccttttcctttgcttccagtggttgcgcccccctgtcatttcttgcaacggctgccaacgagtatccctatttttcggttcttctcacatgctacatgacgcaagttggattggagctatgtcacacggcgtcgatcgtcgtgcaaggctctatgtaatccagctgtgcacaagaatttccctgctgcagtctcaaagttgagagttcatattcgccatgtatgcgtctcttttcatttggcggagtaaaatgaacccgtgtctgccacgaaagtcagttggcagtacgaccaatcccgcatggacaacacatgctagagaaagatgacacgtcacgccctacatcacttcctcgtgtacttactcgtgtacttactttgagagcccgttaatcgaaaaatgagatgccacgtctccagactaagaccttgcggtgagacacatttggccaatttttcaatttgtactggttgaatccttttgtaggaaaatctcacaaaaagggagtgggaagaccattgatggtgttcaataacccgccgtctcgaaaacctgagttactgctttgctatcagtccaacccattatcatggccggcctgcaagacaacagtcaacttacccactccaacggcgagtctcatggccatctatctcccgcttatatctacactaacgcacaccacctatagatattcttatcggcacccttctctttcaaatatcagtaatttcatccttcgctagctctgggatgtcgcgcaaggagactgaggttagcgcgctatttcagccacctctagctggctgcgagactcacgcagatacaggactattgcaaagatgcttttcagacattcaactggatggaaataaagaggtctctcaaaatcgtcaaagacactcctcgaaccgctatcggagaagatagcagtgcccggaacctcgtagttgctttgctagggcagacctacagactttgccctgaaccgcaaagacttccacttttatggaacctcgccgacatattctctccttttgctaccggacaagcacatcgtcgcagccacggaatgacgagtgtggaaatgtccttatcgagttcctccagtccaggtccctcgcaacctggaggaaatagttctcacgcagtcgctctccatcggtacacctctgcgctacacgagaggggccagagagagaacaaaagtcttcagcgaattgatgagcagacaatcacactggatccgcctttgtttatggtaattgttcagtacagaaatctcacctgctccggtagggctcgaacaaagaaagaagctgcgcacttgggcgccaaagaaatttgccgccaactgaatgaagatctatcattagtgtgattattgaagagagagaggcttgatggcagtctgacgggcagctaagtcgagatagacaagtaaactcacactcaggaatgttccgcagcagtgttatagcgcaagagatatcactgaaagaacagtaggtcaaaatgaacatatatatatatatataaaccgatccagctggccgatattcataggggctgtgtgtctttgtgcaaaacatcagaatgaggcaccagtgattaatgggcgccttcaaaagcaggcatcgccgctaacacagaggagaaatcagagaccacttgcaaagaggctatcgaccagcaacatatctcagaaagatcgcctaatatgcttccttgaccgtccagctgttgtgatttttttccgctgctacttagctcactgcgataaagactatttaaaaggacgaaattcagctcaatgatcagaacgaaaaagtattattttatggctttagtataaaaagcccacagaacactaccaattttctagcggtgcagttagacaaattcacgaaacaaaacattggaacttccgagtgggtagagctaatcaggtgaaaatgccttaggcactcataccataatacagtatgtatggccaatcatgggtgtagacaactctgatttgtaatttacccctatattaacaatttgatgtgattcccggcgggtccgtcaaccctgccgaaccgtcaccccattaaaacttcaaattttacattttttcaaacaccatttacatcatcaaacagtattaaattagcaattaagatcttctgtagagaaaatctgaattgccaaagtataggggccaaaacaggaagtgcaggttcaacctggagttctagcgtaggtgaagcataagatgtataccttatactactacctccctggcaaccaatgtcagtagtaaggcctgatacctttgtttaactaccaatattagatatttgcttctttgattccgccctttttatcgtctgctttcggtttccctctcgtgaacgcttgaaaccatcccgcattaagatatgcttgtgccctagtttaaccgacatgttgtaagactgttgaagatcacgttttgtagtcgaagagatcttattagcagttaaatccggactcatgtcaagcctacatttgcgattttcgctgcttgatcgtccgagggataccggtagatttattgctacctgatgttgagccttgtgatgatggtcgatctggtagaggcggagattaaagacgaatattgagctttataacaaccgattggcgcctaattgtattagacctgtagctacaaaggtactctgaacaatagaatctttaaatgaatcgtcacgagctgccggaaagatatcaagaaagtcatcttttttgatagaatcgatgcctaaccggattattcggcaacccgtgatccatagacgcgctttaacacagcaaaacgaccaacatcaagaagtcgtaaaggatgagaggcatacagagacatatagattagtataatgttgttttcctggcaaatcttatcgaatgttgctgtaagatgactgttatggccattgaggaccaaaagacgatgttttctttttgtctgatttatagtatgcagaataaagagccttgagagccgataaacgccaattttataacttgtccagctatttagactaatgttgagagactaatgctttggaaggtcgttgaaccatcgttacataaaaacttttccccttgaaaacaacgtatggtggaagcgctcgtccagaggcgcaaattggttcaataacagtcatctattcacaattgccagcttataaaacgcccctccgactggtgtgactgtgtaatatttttgtggtcgcactgattcccatcgcaaaccctgattcgtcaatgttgtagatatcatcggaagtaataccataatgagtgattgttctttcaacaagcttaaattattcaatgatagtatttgggtcttccaccagggcgcgtttgtaatcatatttgcgagagaatcgagtagtaagctcaggatgtcgtttgatatattgtgttggccaatttttgccaacggtctggagggtatcatctccgcagtgctcaagcagtaaattggccatatctttcaacatcgcgattgtaagcgcagcacctctctgacccatagagattaaccaatcttgaattgatttctcttctagttgcgtgaatttctggcctgtgccccttgcttcatagagattaggaatgcctttcatccgatctacaagagtcgtgcggggacatcaaaagggcgagcagcggtaacgaccatagtaagtctaccattttgaaaagctttgatagctaagaagattttgccctcctgctcgattgactttggggccttttggctgcgctttgggggcatgataggcgcttaaagatagattgttgggagcagaaaattggggtgggatgacggacccgccgggagtcacgttatataaggatcggtaattactaggcctcgccaaacgcgggttcggggcgggttttcatttttccaacccgcccacgggtaacctatcgcgggttttgtatttcacaaacccgcccgtgggtttttggaaaatcttcgtgggtacccaaattacccgtttatacctatcaaaatatataactgatacataatatatgattagttagtctgtgtatttttggtaatttattttggtaccgatttaatataggaaatataatctaataagataaaatatctacccctaaatatatatattaataacggacaatagctatactatattttgggccgattgtctactaccctatattttcggatgctataaccagataccttaaatttaagtaggtcctagtcatataagtatcttctatattagaattgtcacccaattgagataagaaagctagttagataataataaatatatacttaaggttgtttatagtcgcgcgggttttaggtacctataggttaacgcgacctataaaacgcgttagaaaaaaaaataataaaagagtcctaatctaaggtaatagtatctctgactatataatactacattagatttgaaggctaagcctcggttacattaagatttttagaaaaatgtcgtcactattaactaattgatctttaagtctcttacccttaattaaaccgtcctctgattccttcttagactctgatttctaatcctcggtataaatattaagattatatatacttaaatcttacccccctattcctaacgcaagcgaatatactaagtagctatatagtcttttagggaaccccgatagagtagtatatctagttaataacccccgccgattctaaaacgtgtcggaccgaaccgtagaaagaactagatcctatataaattagagaacttaattaactttctaatatagtgggctaaaatggaatacgggtaagtactaaatagcgaaggccgatctagaattaagtggtcgatagatttgtattataccgaagtttagggatacttcaactaagttatagatatcttaactagccgacctaaggtaatctataggtcttatttaactttattagactacccgtaatataataaatataggataagtgctataggaaaatattagagatctaaggcttatcgatatagctagaaaagatcttactattagatactcgtaataaactctatttagaaggccttcctaagagctttatctaattataagaaatttactaccttatagcttaaagaaaggttgctaaagataatagcctatttacaattgcctttttagactattaagaatcctaagttcctagtactacttaatttaatttactctaacctaggagaattagaaatccctttaataaagactctacgacgttgcttatataactctattatagcctaatagaagtcttagttatataacttacccgaagatacgaaagtttctcttatattagattattagactagccctttttagtaagtatttatagcgattatagtatactttatcaataaagattagaactatcgtgaaatacttcttaggtttaagcctttatacagaacttatagtagcgttaatctaaacgaagtacttctttagttacttaaggatagataacttctagattatatctttagtataactatagataatataataaataataagactcttatctaggccttataggagttacttttattaggcggtactattaatataagagaatttattatacgcgtactatatatagcttatatgatttagctttacctaaagtaactactaggttatattaaagctgctctaaagaataaagaagtaagaaggttttagtctaatacttaagctatctatctaagagattctttagagtatagtaatatagcgtatactctcgtaaaggtatatttaacctagaaaaaaaagactataggaacttttattaatatttttcttttaatagattcggttatttactgtctttataaatataagcttataataaagagacacctttttatatctttaatcgggtaggactcggcttttcctcttctataatatatagacccactagaactctacttttttaatactttaaagagcgcgctggcttaggaatactattaataaatactaccgagactataaatatagctaatttaaagttatagatactaagtagtagtaaattgactatatagttaatctaataaggccgttctttaaatttactatagctctaataaagactaaagatataactatctatagtatctttcttatatataagaagcttctagaatatatcgaacgcttaaaccggaagctaagaaagaaaataataccctagaaaaaagatatatacggtactatacttatagtaaagtaaaagttaaaagattattacgagaagacttattataactatagatttctctatagtatagtggctttacttactccttagtataagctttaataaagactaaagatgtaactatctatagtatctttcttatatataagaagcttctagaatatatcgaacgcttaaaccggaagctaagaaagaaaataataccctagaaaaaagatatatacggtactatacttatagtaaagtaaaagttaaaagattattacgagaagacttattataactatagatttctctatagtatagcggctttacttacttcttagtataagctttatacttttgataatatagagtattcgtagtatattagcaagactttaaaaagatattataaatatctacgattatcttttatatagtattaataaagaaacctagagatactattctatactatatagcgccctttattataagccttagagttagaacggcttcttaaactattatatatagtagaaataagcgaaggagtcaggtataacgaggttaatcgttatctctacaagtataagtatacctagcttacttaatctaaaagaccgctaataatcttagcgactaccttaatactaccgcgtatatattaaagagagaataagagtaaattccctatactttcgcgactagctcgtgatttactctcagttctagctactagtataggagttaaaaggctatttaatagtacctaggatatttactattatcgccaaggatctctaaataaaactataatataagacttgataatatatatatactctaagaaatttaccttagagagctagtaatcgaatctattagattataggacagcggaaggggaggattaggaaaatctcgaagaatataagataaataaggagaataaagacgaagatatagctattagtaatatagacgagagcgaattagccgaagatacctatataagtcctactacttagagtactctaggatttgaaagtattaccttataggaacttctgtctcttaatcgaccgtaagatacaacgataaccgctattcgtctagacctagagagcgacgataaagatctattactacctctagttatatatctagaagagagatcttaaaaaagattattaggaaggatgataatacctttaagccggcttaaaggctataagctatattagtttatctgctatagagctataatttgatataatctccttataaaaacacttatcctaaactataaacttttaaaactaggctatgattctactatagttaaggcttttctgaaaagcggtagtagcatatagtctacttaatagtacctttaagccggcttaaaggctataagctatattagtttatctgctatagagctataatttgatataatctccttataaaaacacttatcctaaactataaacttttaaaactaggctatgattctactatagttaaggcttttctgaaaagcggtagtagtatatagtctacttataccgggataatacgttaatctaaataaataattttgtataattttgtgctagctaataaatccttctcttttaggagttataggtaatttaggtacctgtataggtcgcgggttgggttttcaaaaaataaacccacctacgggtctgctgactaagacctgccccgacctatggggcgggttttcgtgggcggattcgggttttggggcgggtttggcgaggtctagctatacctccaaactctttcttcttgattgggagaaaccaatcccgacgcgcgcttggctgggtgaggccaccgccttagaattctggcaaaactgtcattgtaatgtttgtttggtcagtaataagttatcgtcatagtactgtatattatatagaaccacttggaatcgcttggtggatcttatgatcttactagatcgctagctagcttcctatctcccgtttgctatattatatctgcttccacctattctttctatatatagcgaacggtagtctttgctcgctagtcatagtgtaatagcctctacttaccttatagaggaactaaacctggctagaaaagatgttttcgtctatcttataagttctactatctagtacacttcttgtttataactaacgttaatcctaatctagttctcctatctaaactttttaataaggatcgtgatcattataagagataaagtaatctcgcctcgataatataacccggttaacgggccacgaattataggaagactactcgtattatatcctaacgcctaactattatagcagccccttcgtagtactatcggacctaaacccttccttatctagtgtagttgagaatagcttagacttatcgagaacactaccctcactcaacctcaaaactttctagttatataagtaggaatacaggagagcctataacgtagacctactaacatatatctactactagatagagtaacgagtaactgttaataataagagatactatatctataacagtattataaaatagttaggtatagataagaagagcaagctactaagtaaggatagtaggctactcgagcaatagtataataataactttatatagatagagaaagggggaaagtacttagtcctacttacctaagcgaaaagataccgagctatgatatagctaggctcaaatttcgaagtatatatatatattatcgataggaaataccgacgatataatgatatcttaataactacctacgatactggtagaataaggtagcctagagaccatagcttattatcgaaatcacttttaccgaaaactagtactagtataaaaagcggtatatttataaatagcgatcattactaataacagataattactactgctattgtggtcaggggttgggtttttctggcgtacccggactcatgaaggctttggtcgtttgagctgtccttacatttgaaaggacataaaatgatgtgataaatccgaaaacttgtctttacagtctgaacagcttcctagtaaccatcgataatttgcaacgctgattgattgatgataataggctataacgtcattaataaacatgttcagcgtgctgaaaggggtccttcgaaagcacatatggttggttttccatgaaagaaaggaagtactactgcatcaaataaacaggcttagaatggttgcgttcacttgataatagcgctattaacccataacaccaatgtgacgttaccatatcaagcctcgataagctagtactattcgagatatagctagtaagccgtatactaagttcttataaaacactctactattaagaaggggggtaggggggttgtagacaacgtcataaaaacatcaactttcggaaatgctaaacttaatatctaaagaacataagtatatatcatatattaagcttacggcttactatctagagatcttatatttaaactacctatcgcaattattataataaccgacaatcagaaaaccttcactctttctaacggcgcttagattcctactattagtctcagaacctagtaagacaaggaggcctaagaagtagtagtccttaccgctctttacgtaggttatcgctatattaatatagtaagatagtagccctctcccttaataacttaatatagataataaggctaacttctatagctatagcactgagcctactattagtaaagctataaagtaaagtggcattcctcgagaggaaatttttgttaccagtaagctctagaacaataagcatcatcctaaggatcttaactaagcagtataacttttattaaatgatctaggtctagaatatctcgacctattcttaatatattagcctattacttttaagcgtagagataatcctttcccgtccaataaagataggaagctaatcactgataatattgactatctcgatataagccttattggatagtagcctcgagaatacctactaactagttaaagatatatagagctatagaaggccttattaaatccggtaaagctaaggctatcagaatttctaacttttcctaaaaggaagttgaacgtattcttaataacgtggcgattaaaccggccgtatactagatagagctctacccttagcttcaataaaagatattctacgacttctatcggaagaatagtatttatataacgtagtattcactatttagaaactaaaatgaaatttacggttctcgcgaggaatatagttagctagtgaatgatcagaccttagtagaaatcggaaagaagtacagaaagaccttaaactaagtcgctttaggtatatgtactacttataccgagataatgtttctctaactaactaacccttttagcctagggtattatatatagccgttccgttatccctaaatcaaagttagctgagcgaattaaacagaactttgatattactttcgagttagagcctatagatattaaaaatattaatacaatcgataagaagctccgtttcaacgacccaagtaaagactttagctacgaactatattcaggccttaataggaagaagaaataaggagaatttcgattaacctttatcaggatactagagtccggtaagtacctgatcttaggaaaagagatatagcggcgtcgtcgacctagggattcaatcatcatatataggtataatctcggcctttccccaatcaatacactataaagtagtctaaaaagctaatgggaatcttaaaataataagattgatttcagtgggtatcataaaaatgtaatccgaaagaattacctaagcttattacggagaacttagttcgctattacagtcgttgaatctcctagctataaatcgaccttcatatattcattgcctacgacatttcttctaatataatagaaggtaaacctatggccttggcgggaatcccttagaccaatagagaggccgagattgacagcgatgtttattgattgttgctttgttatattgatgttaaagctatatatatggattgagggggacaccaggtagcaaacgtatagcactttcccgtaaaaatacatctagtcatgtcttaatactgtactgtaagatacgcctatcagccttggaaagcggtctgaaaggcggagccttcgctttctatccaatcagaactcacgaccctgggatttattttccaggaaccaagtcacaagagtgcagaggtatagctgatttcgaataatactataacgtgtacctcttatatcaataccattaatttagcctcgtcattgtagaatcgcacggcagaagggtagattgtattgttactcttgacaccatcctatctcatagcatatgtatgttaaatctctatcacagttgagtttaggtaagcttatccccttataactttgagtaaggatatttgcaacttaacagtggcaagcctagtaaaagacacgttatcgtttgggtggacatatcatttgagtggttgaccctggggtgcgacggtctgtaatttatggtaataaatgtaaaacccggttatcgggttctacgcggaattttatctgttgagcccaagggagagctcttctatttgccgtaagccagatttgattctgtattcagtgatcgatcgatacctacctacataaatcctcaccgtcggcatatatatacagatgggggcgctcgcgcggccgtggatcacgttaatatactacccctcaaatcgacagtaagatctgcagaaaaggaacttcgtacggactattacgcttagagtgggagctttctagagaagaaagagtgcgtagagttgaaattatttcgaatatcactgcaataagcgttctgcctagtaagctctatcaaggacgaagttttattagtgcgtctgaggaacatttagtgctctcaatctgcctgaccttgaccctgattcgtaagggccttggctgccttgctcggtatagacttccccactctgtatccatcttaagtatctctgatttgcctttataataggcttcatccctttgcatattcgtcatgtcatcgagaaattactttagcaagtttgcaatgactagacacgcatggcggatgtaggagctgccgaagatataaccggggctagaaccgatgttgagatacttgctgtggtggcaccacaagccaagctgtaagaagacaccgtcgttaaaacagacgctacttcgtgattagcattatgtgaaagatttctcttccaacatacccagttcaattgcagccgcattagtctcaccggccatagtggggcatgagcaatgaatatagtgagtataatgatttgctatagtgtcgaagcaatctatacaggcagctcctccgctttgtattcaataaagttaatgagctagcctttcgacgtaagacgatatgcagggggaatgatctggaacccacccattctggaacaataggcttccatcatcatttcgaagacaatcactctgcttcagcgacgagatgtagacagctccatcatcgaaattcgggcacttataggtgaaagtgcgagaatccgaggcaaaatcataccaacattggtcggccaaggccaatggcagaatgaacaacgcgaaactaagaatggtaatttgcatatcgaagagctggatggagcgagataataaaaaaaaatgggcgtttctgctttatatgagactttgtatttatgtcgtgtctggctcacctattataatagatgttctggtccattttactgtttcgtgaatctgtttgcttctccagaagagttgtcccataatatgtacgtaatgggggattgtttttctatacatgtttgcggggtttggaggctccccgtgtttctcctccatagtacatgtgaaggtgatacaatacgtgtaagttcatagagaaagcactgtatgtattctggtggacgaagaggagaaagagaggacgagagagcaggcaaactatctgggttctatttacatgtgatgccttaggcatccgggcatccaacagaaggtccactataacgtaattagtatctaaccaagactgccatcacgtcgttaaaatttacgtcataggcgatcacttcatgaagccattcgggagagctatcggtaagtccggcatgaaaaagttcaaaccaaagtttctggttgtcgaaattggcaagtaatttcagcaattccgctgcgtctggatcttccttttctaggcgagagtaatctgggcatctaacatccccctcatagaatcctgcatgtactccctatcaagatctccagttccggcatatatagtaaaactctgcaaatttcttgtggatttagcatatgccaattagcttagtaaagatcttgaattgatcctttgcaagagccttggtaaatccatctgcagtatttcgcttggtgttcactcgatgaatctcaacatgtccttgcgccactgtatctttgataaagaagtaacgaagattaagctatctattcgccgatttgcctcctttcttcgagagaagtaattgtaagttgatgttatcagtatagatctctataggacactgctctgggagcataaatgatcgtgcgatcttgtttaaccacattacattacaactaggttgatctagtgtataccacttagcaactgtcatcaaattggctgtgatcgtctgcttctttgtagaccacataataggtgatccagtaaggtactagacatttccttctatcgatttgctatcttcctagtctatatatgaagtatctgtatatatatagaagcgaagttcactggttcgaccaaggataattccaatatcaggttttcgtctcagatactttataatatattacattactttatagttagaaagggtgggatttgctagtcaatgctataagtgtatcactgcgaagcgaatgtctggtcgtatcttaactgctaactagtttaacatccctacaatagactgatattaatcaaaagtatcgttatctagtatattggttatatcggctagtatctctctctatatagctggcaatggcatatctttttagctagaggttttagccatatatagtaccttttacatatacactttctgtgatatagtgattgtcctattagcatagtctctgtcgagcgtatagtttaaatactactttagcttaccaaggtcctttaagtcgtagtactaacgaagttcgctaataacttactcaatatcatcgtcggatggtatagcaataatgaaattattaatatagattattataatagttaaatttatacctttacctttgatataaacgtaaggattatcatccagcggacgaaagctaatctaatatagtttacagtctatctctttattctataggaaagcagagtcttacaatctaaagagcgcttgattaagtgtatatacccagtatttcttatctccttatatatctgtgtactcaaaacctataggttatcttatatagactgtctctacatcttcatataaagtattgagatatacagcagtaaagttaacttgcctccattttagactatatactacaattagtgtaagaacgattttaatcatacattcggcgacaatagggacatatatttctccatcatttttatcttagaaattgccacataccacctattgtactttgaaatcgtagactttatctctggtattagatttgatagtgaatttctattatcctggtagtaccttagcttttaatagcttaaggattaagctctatatgcctttagccttaagatcactaagttatctttatatagcctcttgccattaaggctagaaagggctcttttacacttacttatatatagatagcaagttaatgtcctttatatatagcggctttctattatagagaaatggtttgttaatatcgactttatctattattatattagctattacagacatcgcactaggtcctatagacccctatccatcaccctccgttacattattaccacccgagtcctttgcctttgcccttatggcagctcattaaatatcttagtctcgtttctcatactcgatagtgaggtatttctgctttagatcgtggtatcggtcaggtataatcccaatattcgcttatctcaatcggcggggtagggtaagagccggtatagctaggtcctaagagataggatctagcgataacttaattaagataatcttatagcttagtaatatctctgatcttatagtaaccggtgtgttcttagtgcttatcgttatctccgttatatcgatagcctatatgatcttacgacttagtaatatactgatttatcgagcgggtatagcctatatagtcttacgacttagtaacacactggcttaaggaactggtagagcttatgtgatcttacgacttagtgatatactagcttattaaacgggagaagcttattgagtaggagatgagaaagggtattagtaatctattctctatcgctctagagaaggagttatatcttctaattcctcagtaatagctctcttaatattatcggtatctcgacgaatattatctatacttttagtaagttaagatacttaggttaatagttattaaagtcttcttctgagatcttctttcttccactcaatatctaaaacctataagacactcttagtggtaggatctatgatctcagtgattcttacgcctattatcataggctcctctcccacagttaggagaaaactttaaaagagtttgcactattttattagtagaataattattctctatggtagtgccttctatggtatctcaggcattatagatacactactataaattattagaagataaattatagatagcgtaacaggtacttatataactaattgtataggagtttatatctatagtatacgtactacttactactacttcttttctggcttcaagatcttatcttcttgcgatagtaaaataggtatgaatctaataatattattattattatcaggatccttaggattagtaggtactttactagctagtattagtcctatactatcgttatctctaggttatagaaaactaatatcacaagatactactagtttctttgtgactagatcctacactttataaacatgactaccgtcccccttatagctaataagcatacctttctatactctgggtactactttcctagcctatgtcctcttaggcttcggaatatggatatatacagctgatccctatggtctaaggtgctttaaggaaggctctaggtttataatttcaaattcttaacgccaatgtataagcggcgagatcttagtctttagattaactagtctattatagatatagatggctatatctgttatatacggccacatctcttccagtatcttcgtatcgatgattatcgttctctatatatcattgatatatctaccgaaacgttctactgtactatttagctctgtggtataaggtagtatagtcttaaaagtcatactatacttcttaccctatttgatgaactctttaaactctatactgccatctattcgccagatacctaggtatctgccggtaagtaatttgatcttcttacagaatatagtaagcttatggtaagtatcacttttattctttagtataattccctcaattaatcgagtagtattattaacgactagtagctagtagttctctccatttagcctagtaggttttattagctatatattaatatagaatttctatactatatcttataccctcgcctattattaacgggatatcttaagctttaacttaccttaaaaataggtatcataatcgaagtattccgtgctatactacttatcatcacctaattatttagtatattatagtatggaagtaatgcaagcttttccagtatatccgagacgtctgtggatcttatacgtagtcactttgttcacaaatccaatctcattgttatcgttagaatctatatccgatttaatcttattagggttattatcgtcctttagactaataaggtataggatacctattaatatatctatataccctaggatatctccccttctatttatgagattcttagtatatatatcgtaagagatatcttattctttaagaagcttttgtatactaaatagcttactatatcccctaggagtatagtaaccagttattataaacgagtacatctttctatctaaacctagtagggcagcccttataatgactttactatagcctagtataacgactctattaccagagtaatccttatatatataagctgtattagggtaatccagttagtatgtgtggaagtccttaagatcgtatattaatatcttattagaactagtatctagtaaccaatcattcttcctattaatagaattggcagctataataactatattattctgtctatcttaatattaagttctctagatagcctttaaataggcccacaagttaccggacggttcctacgaggctagtaggttatcactaagataggcacatctctttacagtatatagtctaaagccgtagaataaatacatattattgtcatccttttatatgctattacgcatctcttttatatagtcataaatatctttactatcggtaggctgcttacaaagacctctcttcttcttctttttagtagtagctatatcttcgtcgatagcattaatatctttactggattaggtattattatctttattataaccattattatgactacctcggctactacggtttcctctacaaccacctcttccattacctcagccacagccggtattgttattatagacagtattagtaataccttctatattagtagctgcttagagtgctctctagtactcctccaccttattgagattaagtttcttaggtttaagacttacaacttcttccctaataaactagacctttttgacttctaatttaaggttttaaaggacttatgataggccgtgtactaggtacagtgctaccttaaatcgagtaagcatatggtactgtcactagtactccttaatgtactcgcttactaagttataatccaatcgtttcatcttatcgaacttccttatcttaaggaatacagtttacatctagtcactgccttatattatagctataagcttatcgtataattaatcagtgtacttaggtatctttaacaaattgtacagcttattctatagtataacatcgatttgattgtatatctagcttataactaagtgagaccagtacttctatcttttaaacgaagcatgcgacttaggaggtcagggaatatcgctttctagtagctattctaaagtatatgggatcaactggtaagctagtgcttgtttccaaccacttagattagtgtcattatgctccagtgtccttactttctgaattttagtcattgcaatcgttagcagaccatgtccctgataggacggcttattatcctcatcctcgctattactggcatcctgcgcaaattagatcggatcgttcaaggacaggacttcattgggatcaattgtgttaggcggtacgccgggaagggaggtttgtgggttggtatcccccacatttccggtcgcgacgtctgccatgattggattgtaaagctaaacggagcttttaccggtagggctcgaaggatttcctggatgttattggctggatccgaatctgtgtagtatactacgtacaaaggtggatccactgtggggtcagatcgtcaaaagtctccagatgaaaatagcttcagagaaaagagttgctagtggtccaactagcaaaagaggctcataacctgatacaatacgtgtaagttcatagagaaagcactgtatgtattctggtggacgaagaggagaaagagaggacgagagagcaggcaaactatctgggttctatttacatgtgatgccttaggcatccgggcatccaacaaaagaattctagagaaaggtcatggtatggagaagactatgtgctagcttcctggcacccttgtagggcttcaggagtttccagttgacgtatttgaccgttctaacttctgagaacattactggggaacatgtatatattccccaagaaaaagtgaaagtatgtctatcaaatattcgtacgtccccgtcgcaaatcttcctcattcgggcaaagatcagaatcattttctcaaagattggccagatacaaacaccgcgaaggattccgaaaagacatttacttttcagacaaggcggtagctattttcatgagatgcgggacggcgagttaccattcccgcgtcgaatacgccgctagaagtcttggatcgaggtcttatatctacattcgccatttgaaaactgcagtgcaacatgtttgttcattctccaaagatttcgatgtacggatcatggaacattggccatttattctagctcatttatgataaacagtatctttatcattcattgttctttcatcgatcgcatcgccgatgcagaaacaccacacaatacagacattcacctgaatgaattcaattcatcatcgcacaatgaacaaccgacatcgaagctccccaacgtcaaaacaaacccctccacattttctgtattccgatgacgcatgggcttgttacagaccaaaagtaagaattcattggaaataagacttcttcgggtcatcatcgaatcattgacccctagtaagttgttcgtcggtttcacttagtgaaaaacatgctgctcaatgccatgcagactttgtacgaacagaaaaaagcctctttgaacgatagacgttcggtccactagatctcaccacaaatcaactgtatctgtcagctggtgattgagatacggccgagctagagttcagtacatttcttcttttgtcgaagtcaccatatatttcaagccaacaatcgcggtctctacagtcgtctttttctccgcttgtaaaattcatgtgacagggaggcttgtgcgcatccatagccccagaaggaaaatcgatccaaggctataatgttcatgttagtaagtcaggtattaaggacgtatcttccagtggcacgggtgaatagaaagacaaactttaggaaccggccagtcagagaagtggacagtcttggcttctttgaaaactgttacaggattccaagtctcgcttgagtctccaagatacttagtatgtgattcactgcggaactctcctgacaacaaggtgtaagggcggtgcgggatgatgagcgcatgatctttgtatatggtattcacgatttccatatcgtagtctgatcctcctgaggttttgatagcctccaatatacggtcgaatgcgagatgagacggttggatcagcataagataggtggtcatgacacgatgatcgggatctaaccagtaagcccggggtatagcgacagggcacggaggtagaaaaaataattcgtccatatgctaaatacccaatattagagatataaatggctagaatattatatgaggtagaaacggtacttgcaacatagtgatatccgagtctaagctcagaacacgatcatactgtgtctgattgaaagccaggagtttggtaaaactctccgaccatgtcgctagactgtagtcagcttatcgattctcgaagcatgaaaagtgaatttgacatgcgatcggcctcgtttctagtctgcacttcgactggtaatagtttgacctggtattcatcgcgcgctttacgcagcaaccggctttgcgtcccgtgatccttctcatcaactgagaaatgtaacggatacattaggaaacgatcagccttgctcttgaggcgatgtagagtttcgaaaatcatgaccgaattgcataaataagcttcactggtagcatactgcgaatatgcaaaccttgaccagtccacggcagtttcagctttccagtgagagggaacttcgtgatgtggcggtctcgtctccgtgttccttttcgggaaaatgcttcgtgttggaacaaaagcgaggaagagaattgcgatgatgcctatggttcgtaaggtcgcgcgacattttctcgacatgattgtcttcctagagggataaaatggggactcaaattgagagttcagataaatgaaattggtactaggcaactattacctaacgaagtgtgtatgaggtcatagtaaccactagtttttcaacaatgaaaagataaacggctggatgtgggatggaatcaaataagaactttgaacaagctgcagagtgcagaagcgggcggcctctgtaacaaccatgtatcgatgaaaagtccaattgacgaaattcgcttgacgagtatgtccgagggttgaaatttgaggtttcttaaagttttttctgttcatgttagaaacgtatattccaatttggaaatttaaaaattaaacggagtttataatcttagtcattttataccaataccctagaatgatcatgtttatacatactgtcaacctcccttcagtgctcttgatttgttttttgacggttaggaaagaagaagtcttacaaaacagatcgacaacggtggtgttttgttcattgaagtcgcgtgattcaaaacaaaatctgtgacagccaaggagtaatatacgcgaggagtaatatacgagtttacagactctcaccacagccgggtgcgcaagagcgaaatttggaactgaagctctattggctgtttagattgtctgctcagtggtccatgatctcgattagagtgtctccagtagccatctcaacgcgctggtgatgacaatgaatctatttggtctatatatctatctcgctttgaatacgtgctaccatatgtaaattttgttgagcctgtcgaaatcggaacgtggttgatagatcactggacggcttttgatgatgcttgcgtttaagacaaaatttacgacagacaacaaaagagcgctttccaaccttcaggctggactgggaaaatagagtctgacgcagcaaccaactgaagaattctcagcctataccaccgagcagatcaatctgcaagttgatacgaccataaagattggggtagggcatcagggcaagggccctccacactgtatcacatgagaaggcagcttcagggaactaaggatctccgaacatctcgaagttttgctgatttctcccgtatcagtttgattggccgccagaatggacaatagcgattcaccgtactggatctcggttcaatagttggatcggcgtgaggtgaatcaaatctacgggtttgcgacatatcaaaatttcctatttacccaaaatatcaaaagaaaggatttttcccagccctcatgattagactgaacgaaacagtcaaaagagaaatactgactactgaaacaaaagtagagcgtttcaacggctattgctacctcctgttgtgctttatattcctttgtattttcagccttcgaacaaaacactcaattttagctcagcaatagactttttgagtagccttctaaagatatctatacccgataaggaacaaagtggtacactatatcctgaatagatcaccaaattgtagatatctcaacgttctttttactcacgccacaaaacctccttccgggatggtgaatgaacttcacgggcaatgttatcaagactctttaccacgtgctcgatatcgtctttagatgtttctggattgatcgtacacattcgtaagcagacaagattgtctaggtgagatgtgaaaataacggccacatccctagaagcaatttccttggagatggcctcgttgagctggttaagagtcgcgaggtctactccttgaggagcgtatcggaagtttaggatcgcgagagagctcggcgaaatgatctcccagtcatccaaggtactgatcatacactctagatgccgcgacagctcgaagccatgacaaatcatctgatcgaacttttgaagacctagtacttgtaatgtaaaccacagtctcatatggcgtgcgggacgggtcaattccacgccatagttccacgggtcgggaagttcttcttggcattccacgtcccgtacataatcaccggtcgaggaaaaactttccaatgactgagattggtcacgaaagaagacggcgccgcagccatgagtttgaaataaccatttatgagcatcccaggcgacgctatccgcgaagcagatgtccttcacctttgatcggtgagtctcagaaaacgcgaccgagccaccgtaggctgcatctatatgcagccacatcctccgaccttgcgctatacgcgcgaggtcttctagggcatcaatacttccagtattggtggtaccacagcttgccacaagtaggaatggttttcgatgattttgaaggtcttcatcgatggttttctccagcagtgaaagattcattcggaacttggaatcagtcttgatttcacgaatctgatgatccgggataccaatgatacgaagggcctttcgaacgcagaaatgagtttgctcggagatataagcaaccccgttcgaacgctcttcgactctaagggtttggtctcgcgcaacaaccatcgcagtgagattggccatagaggcaccggaaacgaactgcccgcccgctgacgatggtagcccaaatatttgtgcgatccatttgatcaggccggtctcaatagtacacacccctgcgctggcctcccagcttccgccgaagggattgtgggctgtggtcagacaatcgccaagcttggaaagcggcgatgctggggacggaatacaggagaagaatcgtggatggctgacggcgatccggaaggaaaagatctcatgggcgtccttgatcacttcttcaattggtctggaagcaccaggaacagccaacttcagcaagtcaataaattcccctggatcaggccggcggatgagtgttgtctccgaggcagctgtattgattcgggttagtagtgagctatacgtatgcttgtttagatcggaagccattgttctttttcagataatcactaagaagtgtttctctggattgtgggactttcttttgtaatcttgaacggaggaaaaccaagcagcgaatattgtttaacttggacggttacatttcttgtcggttcctctgttatcttatataagtagggtgagatgacaagtaaatagcgtaatccgacatatcctattaccccaatgaccgagcttggccggttaaaatgcgcactaaaaacgttcgcgatgaatcgcaatcatcatttgatacataagaatagttttctactataactaggactctcatgtcaagttcggtcaattagtgttctcttggtacataaggccgatttaatttagattttaagcatctagccacaacctgaaaaattccccaagtcagctggataattatatgtcatgaatgagtgaggcataccgtggcaatcaaactgtcatcgccttgtttgtcaccgctgagctcccaccacatacccccaccaaggccgttggacttgatgtactcacccttcttacgcgcaatctcggtggtatcataactgatgaataaccgtgattttgagttataacagtagctagcagctgcctcatcgaggttggttaccgcacagcagggctggggcagagccttataatcccaaacaccattctcccagctaccagctcctacgccattgtaagcttggccaggaccattggtgtcactgaaagcccggccgtacagaggcatacccatgacaatcttgtgcgaggccactccgtgcgagatgtaataattgattgcttggtccgtgttgaagggagtgcttcctgggttgtcgttggatgggtggaggttggcattgtgtccagcaacggtgtcccagcttcctgcataatcataggccatcaggttccagaaatcgagatactgatccatccgagcgagatgctctttgtggtaattggcggggcctagaatccgggttagctggcttatttgagtcatttcagaggaatgcacgtaccagcaggcgatgcagcggtgagcaagaaatgatagccgtcattattagttgaactgtataaatcaagcgcctgaaagacttagcagagccggcaaaatataagcgaaaacttgcctcgcgaagacgccttagtatatctataaattggcccgcttctttatcattagcagggtactatccagtatcagcatcaaacagcgagagacaagggactatactcacttcaaaatctacatcaataccgtcaaaacccaaattcttcagcagctcgatagagctattagcaaaattctggcgtccttcctcggtctcaaatgattttttgaggttggaagaataggtccagcctccaatcgataaaagaaccttaaggttgcgattcttcttcttgagtagaaaaagttgcttaacacagccatagacattgcttccgctatcagtccaggaatcagtggagtagtgtttgtcagtgtccgaccaatcatccgacataatcacctcgccggagtcctgggcattggcaaatgcgtagagaacatgggtcagtcgctcggcggggatatcttgagggtggaaatcacgggcatagattccctagccatgtttgtttagttgttttgatccagtgatggcgtattcaaatgacacgtacccagttcacaaagtaggctacggaacgatacccgttactatcacgagtagcaatgtcagttgaatcgatcttagttgacagcagactgtaggcagtattcgctagtcgcgctaggcaaaccaaaaaaagaacaacaaagtgcatgatggtggattttcaacactatatcggatgagacgagtcggtacaaaaagcgccacggaaagggcgagtcgtgttttaaatggctttgaggcaatgagaaacaaggtcagctatactcgaggccgacaaacaactctacaatgtattcctaagcgtgcccaacttggtaatacaaatcaatacttgaaagcggcggcattgaccctcaggaatgctcgacaacggtcaggccagggattcgtctgccaactatacaggttatgaaaaggctacggagaaatggaactcataccaaaattcggtggattccaacgagcgacgacaataaactgcggggtctggctaaagaacaggccagagccgcgacaaaagaagatgctctcccgcaagaacgtgtgccaagaatgaagccaacaacactgaatatagcacggctccaaggaatctctagcgacaagttgccggtgaacgcagggagacacgcaaaacaagttgatgcagcactcctaggcaaacacacccggcagctgtatgaccgattatcatagaaggaagcgaatgtgctggctcaactccgaaccggcatggcaggaatcaatggatatctccatcaaattaacgtggcagacacggaccagcgtgcgtgtggacaagctagagagaccgtggagcatttcctatctcgatgtcaaaaatggacggctcactggacggaattcctgtaacgtaccaacacctaccgaggaaatatatccttcttcctagaaggaaagtcgccttttaagattctgcaaaattgtgtagagcctgaaagattgacgtcgtagaaaccaagaatgagtggcagtcggttatgttgatatggtgatgtagagtgggaagtcctacaaaggatttcaacagtctatcccggctccttattgggtcattcgaccgttcgatgcacaaatagttggaggatcgttggaggggtcatcggcaactatcgtatcgttctctattatggatgtttcacgacgtatgctgttatacacaaaaagcaaaaagctgtgatttctctcttccgttcctaggagctcgattggctctcccaggaggtagcaatcactggcatcgataaggaggcaaaacaattgggggtatcgtataggccctgacagaactacttatttaagccgtcctatatccatcatttccttccttacctttccggcactcgcagtcccaccttcgaactttacttctcaagtcttttacaatttgtcgacacaatgatggtataatcctcctttctattcgaagatcttcttacaactaacgactgacacaatgatgcctagacaagcaatatgggtattccagctaagttcgagcttcgtgactcctccaatcaagcagctctttggcatgccgtctcgagatgcaatgtggcagaggtgaagctgctgctgaagagcggagacgcactcccggcggatctcaatggagtcacgccgctcaactgcgcaattatgcgaaacaacacctcgatagcacggctcctgttaaagcatctgagggcattttactccacgacaacattcctggacgataaagatgtcaacggtgccgagctgccactgtgtctggccgtttccttcgagcgcacgcagatgatagagctgctactcgaatttggtgcggatgtcaatgcggcgaatcggcgcggacacactccattatatcatgcggtagatcagggccgtttggaggccgtagaattgcttcttaaacagcaagacaccaatctgcaggcaccggatcattcagggtctactgctcttcacgtcgctacaaagcggaaccacaagtctatcgtgaatttgcttttagccaacccgaatgtcgatatcaactgcagagatggccacgggaacacacccctctggtggtctactcggctgaagcaagatgacatctccatccgactgctagctgaggatggtgtggatctcaatgctgtcggatggaagagcggttctacaacacctctgtatcatgcagtggaaaggcagaattatttggttgcggaacgatttgtcaaaaatccagagttggatccaaacgtcctcgggtctttccgttggacacctctcggtcacgccgcacgcgacggcaatgttgacatggttaaattactgcttcgaagaaacgatatccaaatcaatgcagtccgcccgggtgaggattccccactttggcttgctgtgaagtgtggtagaaccaaggtggttggtctcctactgcagcagggcaaacgattggacatcaactctcgaaacaacaaagatggccaaagcgccctgtcagcggccgctggctccggatatctacacatcgtgaagctcatcttggaggactcccgaacagacctcaatgctgtggacaagtcgggcaagagtgcaatgtggcacgctgattccaacgggcatcatcaagtcgtcaaggagctcctgaaggacccaaggctttgcgtcgatctgagacctattgcttcggtggcgggcagtcagtagatgctccgagttcgtcaagcgatatgggggaaggggatagccggatctgctttgaccagaaacgaactgcatgtcaatatttgtgcaatgcttcgactgtgtggttaggcttttgatggccctcggcttcatgtagccgacacaatttggccttgtccagctctctcaacattctttgccctggttggtggtcatggggtcattgatcggttggtccggcaccactgagtggttgaaccatcgttcatgttcaatctgctctctttggggatcaccgttgaaatccgtccatccccactctaatccgttaacccgtccatccgtttgaagtctaaccgttcggtggacttcgacagatgatgctccacgaaccatcgaccgatcttcacggatattacgtctctaaaacgacttctttccagaggaaatagtcagtcaataaaaacgtagctgattgtggtcgctaagggtggttgggggatcgttggaggggtcatctgcagctatcctatcgctttctattgtggaagattcatgacgtatgctgttagtagatgctccgagttcgtcaagcgatatggggaagaaaataactggatctgctttggctaagaacgagctgcatgtgaatagttgtgtaatgtttcaattgtgcggttaggcctttgatggccctctgctttatgtaggcagaccaatagccaaatcttatctcgtacatatagccgacacaatttggccgtgtccagctctctaaacaatctttgctctggtaggtggttataggatcactagtcgttggtccagcaccaccgagtggttgaaccatcgttcatattcaatctggaggccattagccagtagtatatagttaaagtcgtagtgccaagggctgctctgtttagggatcaccgttgaaatcctttcatccccactaatccgttagtccgttaatccgttatagtaatccgtttgaagtctaaccgttcggtggacttcgatagataatacttaacgaaccatcgaccggtcttcacggatattacgtctctaaaacgacttctttccagaggaaatagttagtcgttaaaacgtagctaattagtctcgtatatttatccgcattaaaagaaaaataatagctttcaaaagcaacgaaatgcgcgccgcgataagaaagtaatatcgagaggcgctatctatatatatccgtacctttttcccgtcttaggtatcctataaagaagaggaactgacgaatttcagataatcgacttagccttaatattatacccagctaagttcgcctttagctactagtcgaggatagatacgcctagttagtaatagaatctaagaaattattattacagtcgagcctaagtaataggaccgtcggtctgcttcgagctatatataaagaattgggccggtcgctcgaagtagttatactatagaccttatacgattctgacttagggcgggacgataatctaggggaggatataagatatcctctacctactagatttcccggtactaaataaggatataggaagatataagcgcgtataaggaagaagacgggttatttataataaaaatccgctaactagaaggcgcgaaccgcgagctaggggttaagctcgatagtactcgggcccggctagacgacgcgtatagtaaaagcgatcggttctagaaaaagtctcgtcggcttcgggctgagcttgaagctagcttactccgaaccagtcggctggagactaaattaacgcgtgttagagcgggagtcaccgaggcgataaaggctttacaaagccataggaaccagaatagtagctcgccggcggaagaacgcgatcggaattgatgtcaggaaagatctcgcgaagtggcaccgtaatccttgaggagaggttctggtagactgtgtcaacaaaagagggtcacaattctactagtgcgcccgaggtataattattcagcacccccctctgcctcatcccctatttattctgcactttctatagtatataaaaaagacactctcaagtactcaattggctatacccatactagtctgtactgtaacgaccacgttccgacagactaacttactaacacattggtttgtttatgttctataagcacatgagatgcgaccattcgtagaaattcccacttattttatcgagcctacttatcttaacctcgacaagcaggagtgggtggatcctaggttgaacccctataataggaatctcatattgtttatagtgaaaacgcggctataccctaaccaccacgcgtttttacacatcgataagctactatagataatatataaatctcctaggaaggaccagccgtaaatgagctgcgctagaaatgacaagtatgcgtttggtttctgggcagaaaagtatagagagacgatcatagatatatatatatatatatacttcggattaagagaagggtttcgcccaataacgctaagccgtagggggtgacttaaccaataccttataacccctaaaaaccaagccgaaagaaacctcgtagggaagttacgctagtaactaagttaagcgatattagaaagtatattagaggtctctacgtagacaatcctaatacgtttagatttacggcaaagacagcgatatctacgcgaagggatttcctatacggatactatatacgcgcgaatattatgcgctccttatacgtagccgagaaaattaattttgtggcacgtatctttatttactacgtttactagtatttttaattcccccctagcccctaattgctcgaagaatttgctctacctagttagccgtagtcttgtatgatagatagataggatcacacttactcgtagtagcttattaaccgatagtcggtttagatcctcggggagactctaggccttggggctctattttattcccggagagcttcttattattaagctttagaccacgtcggttagggctattagctttagagttacggcatctatctcggtcgcgtcgatttagtaactatactccgcccccgctatatattcctcgttagtattaccccccgaaggtattcgtaacctagactactccttacttactaattttaacgataccggactctataagaaagatcgtatcggtacttaaggtagctagtactctaccctccctatagagatactttattccttttaggacctactaattattagctattagtttcttaatagtagtaaccctttcctttaggaagaggagggaatagcccgtacgccctatacctactagctaaataattatagcgagggctcctttgtcgatagagtatcgcgaccctagtacctagcctacggataacttaaccgcttcctatactaggaaatcctgacctctataacgataatactcgagtaggttagggaagcttcgataggtaacctagtatatcgtcgctactaacgactcggcggaagagggctcctatttaagccgttagatattaactaactcggccttattacttcggagacgggcgaggaagattagccgcccggagacgggcgaggaagattggccgcccgaagattcgaacgatcgactcgtaggccagctatagatctttattaacttatcggatctttagtaccacgttttaattctttcgctgagtaggagcgggacgagctaagggggatcctacggtagatatttcgggctaggggtcggataggtatagctgtgaacgagaggcctgctcgatttcgagatctaaatcgcgctttcgctttagactaagccatatagtccgtggtcggacgaggtgagtctgattggagtctattttaaaggcgccgtatagagagggttgctagtctagtgagatatacttaggttatagtgcgactactttatactctagcgtctacaaatctaatcccgggcacgtctgcttaagagagaaccgaaataagcgggtatatttgattctccggccgtctaatattattcatacggtcggtagaagtttacgcgactacttgtatagcgatagcaactctttgtgcgggtcgttcaaggcctatcctcgtcatatattgatagaattataatctgcaacccatccaacgacacaaggaatagggagggtataccatacatatggttcgtggacatgaaagaaacagccaaaatgcccctagctcgaacgatgccaatgaatggctataagggcgatatcgctagcacacgctgatcgggataactagtaggatgtacctacatcccggagcagttaactatggccctaggagtagtcaagcttgcgacaatcatttactccgaggaagtcaatgaatctccacggaattaagctataaaattattttcgacgcttattgctctcgttaagactagagctatgacctagcttaatattataggagttctacctagtagcttttagggtacttttgctcaatctaggtattatactctctacgacgctatataacgggtgtcgtcctctcttataaatatactattttctagttcagctctcttttaatatatatcgggactctatctttcaatcggtacttagctagatttttagaaacccttactatctactaatatactagggtattagagacgatagaattaaatatcggaacgacgtactaaagatatctcgtatcaatagtacgatctaattaggcctattccgaggaggccctaatagacttccttataaattagtccttatagatatagtaaaatctatattatatataaaatataggcccgataactcctaagctaagtagtatacctaacaatagatttaagaatagattattaagtttaattaagtagatattactcctataaccccgaatctaaggatctataatatagactaactagttagtatcgtttagctatattatctcccgcagtatctatataacgcgccggattaattcctagaatgccggttacgttagtatttcgaagttagagataaagatattaggataatattatgaaggctaaagaagccctatttaaggctataactaaggtacagctagaatttgtcttttaatacgttagattaggttcttgtatcagaagggctttaaggttatatagttactactaacagtctcctctccctataaaatcgatactatataagtataatattagtagtataacagattatatcatccttactaccctatcgaccctacttaccccttctataacttatatataataaagttactcgagctattacgtagccttatcgatagaatccgctaataagggttatctaccaccccgtatatctattatttaagaagaacagtcaaaaattatatatagtggaacgatctatagtacctaccggattgacctacccgattctaaatactctaagttacccttatcttgattaagattcggagtaggtattatctctagagatagggcagtcgacctccgcgtatagttatattcgaacgctagtctaaggatactagctaccggtatagcttacgatatagttaagataagggctggttcgagtttatcaagtacccgctctaactctcgcgcgagtacacgggcacgggataaatgctttcgatcttttattactacttaagaagggtatactgtatatactatacgcagagaccgaaattatagatttccaggaataaataatagagtagaactagcttcctcttatgcttccttaatcgaagaaataaagtgagttatcatgctatatagtgcggagttccgcgcgcgcccgcaggaaacccaacggctagcatgtaggtaatttttacacgttggctgaccgtcatttaagtataacttagctacccatttctatgggccccgaaatattgcttctcaagccgacgtccaccgtttctgcatcctttctaggctcctagcgcctctgttttctcaaccacgctgttaagtatgaccttaaataactccgagccttaggaaccttcttagataccgtgttcttttagaagatagtctattatagctcctatccgctagctagccttataaataagatcagccaatttacttacttactctagctcgtcggtaacctacgttagggccttccgcgtagtggttaggtcttagtcgagctttccctagattttctctatacgaattacccgcgaattcactacagtaagaatacaaagtatttcctatagaagttaggagagtcttattagagatactttagtaagattgtactgactagagtatctatagcttagctaattaagcttaaggaaaaatgagtgttattaggtaggtcctaaaaccctaatagtcggatgaatcaagtcctatagtctcggtttatctagaggataaacgaattagtatagtaatactaccttagtcgaccacgtaactaaggtattgctggtttgagaacgttagtttctgcgggctagggcggcctttatattgaagaccggatcgctaaacggatccgaaaagaacacgctgttatctctccgtataaggctatagtatatactaagtcgatatggtgaagtggccgtcacggagacacgaggaaaagccacggcgagattatcgatagcgcagatgaccataattctgtttatactaatatatatataagtctatagagcagcgattgttagtttgtcatagcgcacatagttatctctaggcacggatagattactagatatcattttagttctacagtattatatctgcagtgctttctttacccgcgagaccatacctacactcctattaagaattctcaagacggtgggactggaggtaatatatattgtttgttgtccgccactctcgtcaaggcgaccgacggattttccaatcctcctttcctcgagattactagacggtgagtggaatactagaatgtgaattttggctactgacttttactaggatgtcactgtgaccgttgaagatgaacaaagcccgtcagcagcctcacagacctgactcgcaggtcactagcggtggtatactccatgtaagggaaatcgatggtggaatggccctggatggtctacaggacatgaaggatgaccgatttaagaacattgtcaatatagttgaagaagatccgattataagtctgcgtggcacatgcacatatatcgtttaaaaagactgtgatccgttgagatatcaccgcattagatggcaggcctctctgaggtagatctagtagaagtaattcttggacacgatcgaaggtgctggcactttcgttggaggcttcttcaacaaccaccgacttgaacaaccactgacttccacgttccttatcgatgtgctttttgtttaaacgttctcacttgaacgcttgagtttaaacatgcattgtttcaacgtgctttgatttaacgtcctcacttaaccgttctcacttaaacgcttgtggttaaacgtgctgtgtttgtttaaacgttctcacttgaacgcttgtggttaaacgtgctatgtttgtttaaacgttctcacttaaacgcttgtgttcaaacgtgcttaaacgtgtttagtttaaccgttctcacataaacgcttgtgctgaagcgtgctttgtttcaacgtgctttgtttgaccgttctcatttaaccgttctcacataaacgcatgtgttcaaaaatactgtgtttaaacgcttccctcgttctcagctatcctttcgtacaacacgctccgctttttaaacgctgtcgtcatcagcgccttctttcttttcaatctttataagcttctttctcatgcacactaagcgccctcgctttcaacgctactgatttaattgtcctcctcaatccaacgcccattatcgttggaccttcaagataagaccgtttgacacccccgacttcaacaccctggctttaacagattacctatcgctgcctgagtcgccgtaggagaccataggctacttttcaagtttgtccagactcagtatgacgatcttcaacaatttaatcaaccaaaggttacaggacagttcccctcgtctgaatgttgtgggctcagccctcgaaagtaagtcttaaggaagcttcaatctgaacggttcaattcgctaaccagtccgcatttttctaccactttccatctatcatctcaactagagcagtagctgtatacgaagaaaaaaataaaacaacggaaggctctggtcttacagtatgatagccatgcagtctctcctgtctatgcacactgcagaaatggcaaaggagcctatctcactgctgtctcctttgatcggtgagaggcgtcgcattccgagatgccaattccacctccaacttgttgacttgtttctcaaatccccatgctcgtttttcggccgcctgaaggcagtaatcatggtattggatgtaagcatgaagttcttccttctctgctttctccttctgtagcgtatccctgatcttgtcattgatgccaagcaaattgatatactcaccgtatatctgggcgataattgtctccagtctttcttttgaatgttgtatacgttgttgacgggatggagggtgtatcatcttccgtggaatatttggacgattgttggtgggtaaggctggatgggcgcctggtggggggacaatagctgaaaagcgcgatatccttgctctctggggaggcatgttggtgcttgactcggaattgatttgttggaattggaggtttagaggccaaagtgatgtggaatggcataatggtaagggaatcgtagcatttatattccccgatgaaaggagtacacatgacatgacggggcggggtcttgcgcaccatccctgtaagcaacgattcctggaaccaagcaaaggacccctgggctaaacatctgtttctgggagctctaggcttatgtttcggcgtccggtactccgggaagcgctgtgagggacatacacgaagtgcacaggtactgtacaaggattttccgaatttctctattgcaatgaagatttgatcggttcactgtatgtgacatactctctggtttccaggagcctataggcaccgaaaatttgagaaaaagacccatcgcgcgttttaattggaattatggagcgaatcatgcctcctgggagtttgtattcatagatcgccgggcccactggcttcattgacatgagcactatatatgaggctttttttcagatcggacaaaattcgaccattgaccagacggcgacagatagcccggacttgctcgtcaaatgccatctgtatcacgaaaactatggatccgaccaccctattcagaatggaacctccaaccccggagcagaccgaacaccaaagcaaggaaggcatatggacgcgcggactggaccagaatcggcgaggaagtagctcgatagatgagcccatggaggcagatcaagaccaggccaacactcgaccaggtagtggaacaccttacagcggcgacggcctaggcggtcgaccggtttatacccgacaacgccccacactatactccaagcgatggttcacgccagatctaaaggcccagcaagtcgaagtcaatcaactacgtaggaggtagcagaaaaactacgctgagttaggaagaacacacgctgataccacagctaccttctatgcaatacaatagaaacgaagagcgtggataagaactatcgaaaaagccaagtccttgtattagaagcagtttctagacgaagctagtaaagggaagctctagaaggctgcgatatatataaaacctcgagatatataggattgcgtcctagtactacgagtaggctcggaggagtatatctaaaacgaagacaaagcgaaagcattcctagatacgttcttccccgccataagtctacctaagttcaactcgccggttatactaacgacggaactcctatagcacccaatcacagaattagaagttaagcgattactaaaagcagctaaggggaatacagcgcccggagaagataacttaccgatactagtttagaagaagctttagaggcatcttaagacctttattattagtatctttatagtaagtatagagcttaggtactatctgagatagtagaggagcgcgaaaatcatcgttttacgaaaactaggcaagcctaattactctaaacctagtacctaccgcccaatcttactgttaaacacgcttagcaaactcctagaggtagtgatagcccgacagttatcctatctagcagagaaatatagcctactactaaacagctagttcggtagacgaccgggtaggactaccgagtaagctctactagtactatctagtgcgatcgataaagcctagtataagtagactgcggcacgatccacaatatccgcggatatccacaatccatatccgcaaactgcggatatggatattttttgatatccaagatccgcagccttgcggatttggatatggaccttatatccattggatatctgcggatatccaatggatatcaaacaatacaaacatgcctagactcgtgacctcaaggggtgtgcattattattatacattcctatgtatttttcgtgtaatacttggtactcgaggttattgaatattaccaggtaaaccgtaagtataatttctgaccttagtcagaaattatgggtagaaggtcaagtactgttctactcacagtagtatacaattggaatctctgaccatggtcagaaattcagtctatacattttttagggggtttatgaatttaaatcttctaggccctatttactatttatagatctaactggaagccatctggtaaccttggctgttttcgaatccgccctaaacggcctaatatactcccatcgaccagtatctctggaagcttatcatcctctttaacagcctcgtatggttgtttttaaggttgttttccttttacccgtctacattgcttagtactatcatcatccaagttattatcaccgctctcagtatactgggtagcctcgagtctagtctcttaatcctcctccttattatcactgataggctctaagaccttaagctatggtaatgatctccgggtttaatctagtaaagcagctttaccttaggatagatgctctttaataatccctagctcctcttgccgaagattaaagttagtagcaaactgatatagcattaggccacagattgtactcggctttaattgactacaacggtaataatagatatcataagcacagttaaatagtcgtttaataccagtactactagcagggatagatagaatgtcccttactatcctagctagggtcgggaagctcttcttatattccttccagaaaagtcgaggtttctatcactcaattctataagtaagatatcatgtaatctcgtcgttatctggttttacaagctcttctaatagctggttctgggatatataagcagtattaagatcacagtcattattcttattaatagctactccagaagtctccagtactactgggtcattggtattataggtaagtatcttcctatatcgatcaaactcttggcttaggacctcttgataataatttatataatcaatattaccctactaatcagtcgaggaaaagtaccagagtttctttaatagagagaagattgttactagagtatagatattactataaggcttatagtcggtagcagtgtagtacttagagagctttttctttactatttagagtgcccgtaatatccatttcttctagattatacctttattcttaagctttaccttagctgtatcgagataggagaaaagcttattatagatactatagatattatatatagtaatatcctttatctttgatagcattattataaaatcaaagaagggctttattagaagaagaagatactcgacttaacaccactcttctagattaagcttaaaataaagatattaatgattagtataatactaatcatagaatggctggagcttcttagcctagttgagtattaaaaatgttaaattctattatatccaaatatcttggattagaatcaatgtaggctctggctaaagggctataaatgcctcctgacgttgtgggcttatattaataaagactactagtccttagatcttctatacttttattagtctagctattataaggatctaggggtagaagatataccttttttaatatatctatgatctggataccgctagaggtattacacttattctagaaggagtgggttttttcctcagaccactctaactcaatctctttattacttggcactgccttaagcttcctaagaagcttatttagactcagctggattatatgcgcgatatatgggacacagaagattaagatatctgatgaatactaagactaaaggtggtcctagatactctgtatcaaagtattattattagttgcgttatctatagtcactaataggatataatccgagataccatactctgttaggatctaggtcatagttttactaagattttcaccagtataggagccatagagaggctcaaagcctagaagaaccttatagtaatcccagttataatcaataaagtaaccagtgatagttataaaggcctactagaaaggagaagtccagtaatctaaggctattgatagccgatacccctctagaagtctctatagaatccccttctagttattctggattattatatcgagataacatcgaatggtttatactaatggaattgtaagtttagtagataattgttaagcaacctctaattctatgatctggatactgctggaggtattgcgcttattctagaaggaataggttttttccttagaccactctaactcgatctctttattgcttagtactgccttaagcttcctaagaagctcatttagactcagctagattatatgcgcgatatataggatatagaagattgagatatctaataaatgctaagactgaaggtagtcctagatactctatattaaagtattattattagttgcgttatctgtagtcactaataggacacgatctaagataccatactctattaggatctaggtcacagttttactaagatttttaccagtataggagccatagagaggctcaaagcctagaagaaccttatagtaatcctagttataattaataaagtaactaatgatagctataaaggcctgctagaaaggagaagtctagtaatctaaggctattaatagccgatacccctctagaagtctctgtagaatccccttctagttattctagattattatatcgagataatatcaaatggtttatactaatggaattgtaagtttagtggataattgttaagcaacctctaatatatagtggaattaggggtattcgatcactcaaaagggcagatatatagtcgaaataaatcttagaatagtattagagagatggtcttaggtaaatgatatactagtaatacctggctagattaaagtactcaatattagctgctaaattataaagaacttaactactatagtaatgccagttaagtgccctagttaatataccattcttttaagaagctagtcgattcttaggccacttttttttaaatatactccagttttaaggtatgctattataggcgaagaactagtacgccggaatcttagatggctaatcatacagagatataccttatatataaccttcggctttccatttttatcatttataacctagtagaagctatcctagatatccaatttgctttttaattcctatcgaattgtattcctaatattagactaagatctatacttagttataagctactaactaacgaatttattgcataagtcctccatatcattatatatagaatcagatagatataaaacccagtgcttttgaaggggaggtctaacgcaagtaagggataagggcataagggttaaataagttaaataagtcagcgatatcgataggactagtatttagatacctaaaaaatcggagaagttattagggtaaatccaattagaagctaaatccatatctaaattagtgaataagaactgtgattaagatattaagaagttaataattataatatatagtatagtagggtgcttaaaagaatagagaggcttatatctgaagtagtagaggtttttaggggtaaagtaagcgtactaggatattctaacttagacttacttttgatatggtttacctaaatgattggctgtattatatattagtacggataattggaggatatcctatagattttgaggatatcttaaggatattgaggatatcttatagatattttgtggatattttgtggatatccataagatatccgtaagacctcgaaactcataaagtccgtatttcaagaacttctatctcggatttctcaagttctagtagtcagaataaattgaaaaaataatcagtagatagctaggactctcggcttttatttaagcctaaggttgaaataattcatctaataataaaggttttgattttctatgttctgtttcttacgaagtttattattgttaacagtagttaaatatatatttctatatataacttataacaaaatcgttaatctacggctatctttataataaaacgtcggactaagaaaactacgatactacctacaaatactgtataaggagaccttcgatacatatctatttcctaaaatttcaaagtgccgaccgtcgatttaaggggttggttctgtcaggactaaacatgcgtttatttcagtggtaaggaaatattggtaagctgcattaagatcatgtgataggctataagggggaaagtaagcgagagttatgctagtgcggatatggatatgaactcatatccgcagtgcggatgtggatatcaactcatatccaatatccgcaaattgcggatataaggatcgatctgatatccattggagcggatatgccgcagtctaagtataagtataaggtagtgaccctaatcgccttcgaccttaaaggtacttttaacggagtcaataagatcagcctagatacgtcgctataggtaagacggatcccgcttatagccagaaaatggattataagctttataagcgaccggcacgctaatatcgggtttgacgacttccgtacggagactactccgctagtgaactctaggctagcttaaggattactactttccgctatcttatttatattctttaataccgacctcgtagatcagcccgtcgactcctagggaggtatatcggcattcatcgacgattacttccgatagagagtagggggctcagtagaagagaatttgactaagatacaatccgaggatatccctcgtatcgaagagtaggcgcggagaacaggatcctgcttcatagcggagaaacccgaacttatctatctcactagaaaaaggggagaatatatagaaggacgaatcatctttaataggaccgacgtcaagccatcgcctacagctaaattactaggctatcaagcgcgccaccaaaacggcaatcgctttaagtggactacgacacttgcgcctagagcagatgcgacagctctaccaggcatatatcgcgcctatagtagactacgtatcgacggtctagcatgacccgcttagggacaaagttcatatccgatacttaaatatagttcagagaaccgtattgattagaatcctatcggcgtttaggacggtagcgaccgcgacccttaaggtagaagcctatatacttcccacataccttcgccttcgctaccgcgcgtagcgtacgattacgagactacatactctaccccgcgactatcccatttagagtgctctgttaagagcctagaaccgtaggaacaatatcggatcatacgcctacttcctattagtagaagcgctaaagactatggacgttggtaggcttaacgaactagagataatcgacttacgcccgctaccaccgtagcgaaaggacgcctttatagagattgagctagaacccgaccgagagatagcgagagaaagagcggcgtccgtaaaggacacgttatagtcgtctactcggatacctccgggcgcgagggtcatctaggagccgctatcgtcgcccttaacgataataataaagtgacggaatcttaacgggtataagtagggtcgatagaacggtggtctatttatatagcggaacttataggcatcttctacgcggtcagcacggtatttaagttagcctactaacgggtaagcgtcggagactatatatatacaatagcaataatcctttataatagtagatccgctttataagcaatccagaacgtaagaaatagatcagggtaacaaatcatctatacaatcctctaagcagctactgaggttcaagtagggtatatttccctccgtctctagtagatactaagatactataaaatcgccgggaacgaggccgcggatcgactcgctaaagaagcagcgcaaccgggtaaaacctatccttttcggccgctactaacgagagagaacgcctttctctatagtaggatctatacttagtaggagtaggagtagaaatcaagtaccaaaggcgcgtacctacggaaagtagacggcgcgctaccagcgaggtatactaggaaaatatacggaagcttgcctaggaaccgagtatacctactcactcagctacgcacgggccacaactagttatccacgtacgctaagaaatttggtttccgggtgcggcgtataggagacggtcagccacgtattgctagaatatccaaaactacgagagttacggatagaattaagaagaagtgttagggacgcgttgaacagcgtgtcgagtctgctgggaggctcatcccgcatatcgttcgcgaagttgggatctaaaccataacccactaggctgggtacggattcgtattttggtctagttgggaattcaactcgcgaggggacagggtaaatgaatcctactactactactactgtctgtattatcgagaccagtctgcgtcaatctaacgacctctagcaaacaagtctcttactgtacaaagacatacataattactctatacagtatgaatggatgatttcatttagcctgactcctagcttttatttgattataggccactatccactagacttggtacgcatttatatttaatctagttggtgagccagttcttttggcgatatacgtgatcggattgtccgtgaaggctcacgtatgtcaatgtttatgaggacctttcggttgtctccgaaagtgtacttgtttgcttgactcctgtaatgtaaaacgctggaaagatatcaattatgatgaaattggatggaagaggaacgacggagtctcgatatttagagcaacagataagaagattatggaagttcattctggccccttggctgagccttttgaccaatgccccttcagcgtgttttcggtgctttaatgaaccagttttagtttgcggatttaaaacgaggtggggaaggtatttcaaagcaaaaaacttacgatcaataagagaagaaggaacgaatagcggcgttgacacataggtcggttacttcactcggaataacatcctcgtaaggagggttgcagttgcagctcgtgctcaatgtaatgttgttgccactgtcggtagagaccttaaccgattccgtgccggttcccagagtctggcacccggcttcgaagcctccaacctcttttcccgcgcctgaacaatcaattgtggagtagtaagtaactgaccacagagcagatgctgaagtggctagtctaagtacgaaaggggtttcgaaacgcatgatttcgatgtttaggtgaaattaatgtatgatatgcataaaccaaattgagagtcagaatacggtagaaattcccttgttatatctccttccaaggcggagttgcaccttcacaggcaatacaatggggtctacggggctaaaacgcggccgagctctcccaaccactctctccatacgtagctcctgtgctttggtccacggctcagtgggagtagcaaccttacgtacataccaccggagcctaggtcttttcacacagcaatctctagaggtgcttgcatctttcaccacactcgagcttcgaggaacgccgtcagaagcacgtcgtcaatttaacgcggttaaccccatcggccccaacgcactctaggctcggttgaacgttcatgtgcgcatgcgtggacattttagtgattataaacatcctcattagaggaaatccatcagctcagctattctgggggatgttgaaaatccatgtttatgcaccccctgtttacccttccacgagtttttgacacaaagtgaattggtggtggtatttttacgaagaccaggagccatggtatactctgacactatacgaggcacccttcttagagagctgtgtgtcatcgggattttgtgtatattttgaaatcatgtggaagcttgggccgattcctgacgttgaggctgtgcaaaacgtttataaagccggtcaaaatttaactaactgtgttggttggatggcacggtgtgtgaatgaataagatggttggaatggcgacactaatcgctgtaatggccatgattaaatcgcagcttttaagacaagcctgtgactgttgcgttcttgacctgtatcaattgcatcttttgcacgctcaaacctcccatcatcactttactttgaacaacgggatctttcaaatcaactaaggcgtgtatgttagattttcgtagataccaaaagcaggtgatatttcaaatcagtcttgttgagtgttgagatcagctagtcaaaagtcgtttgttctgcggttttcttggaggattggtattgtgcccacaaaccaagaaaagcggtctaacgtgctgaattctaaatgcctggctacacgaagcctcttgaaacgtcgtatgatacggtattgagcccaatgtgtacattaccttacttctgcggttagtttctttgctcttacgtaatcgtggctgtggcgatgcaaaattgtatcgatctgtaaaatgtatcgtaagttatattcggtttgctgtattggggtttccacaaatatccaagtgcaattgcatacagtgtcatttctccttttaattggtatcatctctgaggaattctgggcatactgtagacccctagttcatgtcatgacttttctgatcgaagggtttgggcttgttggagggggagatggtcgactagagagcaagaaaaggacaacctagaatgtctttactccgcgggcgtttcaattgggtagaatctgaaaaaaggtgctaaaccccatgcattatactgccacttgatcatcttctacgccctggtttgtagagaaattatcggatgtacattgtgaatagaacagaaaaggtatatgaagcaattatgctatggcgccatttcccagtaaagcatactcgaaggcttttttttcttcgatcccgagaaaacctagaaacccgcctgaatacgttgggcttctgtaaagtagcgaacatggtggacatcttccgcatggcgtttgagcgctttatgtccactcaacacaagctggcaatatctgtcaggacaggttatgagctcagttggcttgtatttccgaagatgcttttcgaaatgttctcgagcttttcgggatgaggcaaagtagcactggtactgcggttcaaaaatgcagaaaaggcaatgtcgattggtgagcgagatgggacagcctcggggttctggtgatgaagaggactctgtttccgccgaaggcagttcttttggtagcgaaactatgttgctgccgatggcatattcggtttgtctctcagggttaaatctttcgggtggtactttccgaacacggccaagctcaatcagagcattgaccagagtgactcgctgtgccatatcatttttctctgaaagatcttgcatggatatttgcatcaattccgctacctgacgacgctcatccaaacgatgaacgatcttctcgggcgcataagcctgcttgtcaatatccaaaagcgagggatcgagctgtctgttgatctcaagagtatcgatcgtggaaaagaattcaccacgagctccttcaaatgtgtctttcttcaattttgccttggcacatcgcaatgcagcttccgtcttggctttgagctctccaattttggtgccagccgcgttcttcatagatccatacatctctttggcttctttggcaagagaatcgcgcatttcttacaggccaactatctcagggtgagttgaaagtgaagctcgcgtagtggcaggcaaatcgtcgtaatgagaaggagctcgagggtcgatatagcggctttggtgactcagaatgttcatcaatgcgtcctccgaaggtatcccaagaaatgcggcttgaacatgggactggacacgctgattcatatatatctgaaaggtgctagcatatacatggcccatcacctgttggagcaaaggaagaggtgcagtttctgaacagagtgcctgcgtcagctttggaagtacaatttatgttgtatgggaacttactttcaacagcctcaccggtgccacgccggagatcgtaaggtttcatagcacggggcatgcccactgcgagactcaacctttcaagataatatagatacgtgtggtatttgaggggtttgatctcatgggtgctgataccacaatgggtcgatattggctgacggcagataggcaaattgagcttttctttcacaaacctcaactgcaaggagtggcgcggcgattctacccgggaggcaaaaatgtcctcgatcgagcgaattttgctctcgaacgctccatcgaggaaggccatagcgaccacaagcatggcaatgtcaaagaatggctgtttcacttcagacattaagaatattttccttcaccatgcgatcagcctcgcataggaaaggcagggtacctaatggatcttcactcacttttttggtcttttatcatggcccttggtatgttttaaatcaacttccatcacgagatgatcacggataccaccaggattcggtagaagtatcaggcttatctggccgtagcaaagtgtttttagatcctcgtctctgagatcccattcatccattttatcggtttcagtagcgtcaacctcactcacacttccaaagaagcgctggacattagtctgctcgttcttttcaacatacaccaatgcccccggtcggcttgcagtataagccgacacgagtaagacgaaagcgagctggatgatttgccggccgtccggatatggcgtagtatctttcgtccagtggtaatgaagcacaatgtacaaatcatcgacgttcatgacgggcttttcctcaacagacctatccagattgaaacgttcaactaggtctttgttcatgtactatcacccttctgtcagaaaataaaaagagcagagagcaagaaaaacccacatcattgatatcctggcagcttttcgcgtggaggctacgccccaccgctttgcgatagagctggcaccataaccgccagttctcgtgcaggctgctgaacttttttattttagagttgtgcagtatccactcaagaaatatcatcacatcctctttccttgctgcgtggagagacttcaagtactcctttttccctagaaagtcacaatgcctgggctttgatcagcgcgatattccgggatatgataagaaaagacgcctacttaatccatcttctcttgatgtattcaatgttgttcttcgtggatacagcatgtcgcttttgaattatgctcttctctagttgtcggcggcgctgaacataatactccgggctaggtactatctttgccttcatgcgggaagcgtaagagtctgaaacagtcatggcttcaggtagcaataagcctagcagatgccagagaatagtggcaggcttcaggaaactgaatgggaaagaagctggttggtatggcgataatgacagttgcccagaaggaaggttggagagatacaatgtagaaaagactgttgctggtgagttggactgtagaaaggctacgagatgatggggagggggggcgaccatttaaatattgagaaccggtcttgatggctccgcaagacagacgatttatcatctttgtctggagcggctacaaacggactgaaggatactgagcatcacgtcatcactgatcaattgccctgagcatactgagcgaagggtgagcagatcactgagcagccctgagcatactgagtgaagggtgagcagatcactgagcagccctgagtgctcagtgatcaaaagtacattatgcacacgtgatgttatgatgactaagattttggtaaaaagggagcttaaaccggcgtccaaggtagccatttacggcagccgatttaccgtcaattagcgttgtggtgtaatcaattatcgggtaagatttatggtagatttcagcggtacggggcccaagtcacattatgttgagggcctactgtgtggcacaagcgagaagagggagagagttaagattcatacgtagggctgtatctactacgaggtgaggcttcttgaaaagacactcggaagtatcaggaactaaattgtaaagctgcctagtctccccattcatgtgatataatacaacgcacattgtgtgcatagaaatgcgtaagcgatatcaaattacattagcagcgctcatcatgcatccgtaggctgttgctattcttggctagcgttgaataaccctagctataatgttaattacttactaggattctcaacaaatagtaagccctacattctggggtccctatggtccagttactttttcaaggcatatacagaaaggcagggattgcaactttgaccataaccgccgattttaaacttatcattgcatgcctagaaaaggcaccatttccgataatctttttttttcaagactttattgtgagtattattccgtttatctgtgtcatacgatataagacattggattttatataaaccagtctgccaaatccacggttaaaactctcccagcttacaatcacaaaatggcatcccaggatggattaccctcgaaccaggccggcatcatacaacatgaaggtggtgttcttcgaatcactcatggtctgcctatcccagaacttggcccccaccaaatgctggtgaagactgctgccgtggccctcaacccctgtgattttaaaatgccactgaggttcccgaccccaggtctctgggatgggtgtgacttttcaggcaccgtggtcgcactaggaagcgaggttgctgcacagggacgattccgtcttggagaccaagcttttggtgctgttcaaggctccaatatgtcagatcccatgtctggagcctattgcgaatacattagaaccgagccggatctgactttccatgttcccaaaggaatggaccttgtcaacgcaacctctctctcggggactggaattgcaactcttggggttgctcttttctggtcacttcagttgcctggaacattgactacaccagcatccaaacccgaggatgttctggtatacggcgggagtagcactataggactacttgcaatccagatggtgaagctgtaagtatccccttccttcccataactttctgtatatttggataactgattcatcttgcttagctgtggccaccgggtaattaccacatgttcccctcataaccgcgacttggtgacatcatacggggcagatcttgtctttgattacaactctccaacgtgtgccgaagacattcgagcggctacaaagaacaccttacgctatgttcttgatccctttgcggaagcaaagactctgcggatgtgccatgcatccattggtcgtaccggaggaaggtactgtgcacttgagcaataccaagaaggcctttgtttgcgaaagacaatcaagcacgagctagtcatgggaggtgccatctccggacgaggtgtcgagctaccagacccatatggcattccaccacgacctgagattggagtctgggctcggtcatggtacctagagctccaaaaattgatagacggtgggaagcttaagccctgtccaactcaaatcattgcaggcgaatttgaagggatcttgaagggtttggacatactgcgaaatggaagggtctcggggaagaagctcgtcgtccctatgatcaccaaataaaacgttgtattgatgtggaggaaggaagtcagaatagcgcgatcgcgaattatttgagaaaatatacattttgatgtacggttggaatcccatgccagcttgtacacacgagactgctcatctctagattatcgtcatagtctagctttgaactgatttacacatcagatattgatctctttggttttcctttgagttaaatctcctgactggtgtgatgggctttggacgtacggagtagagagctcgatattatcggctactcgagtagaaaaagtgtcatcctatgagagtcgaaaagatcgcttaaccaagtaactctagaaggaagttaaattaaggatatgaggtacattcattcgatatgcgttggaaatacggaattatcgacgtaggtggtaggttaggggtctaatttggaccatcgtaaaccatcttagcaatgactttcttttcctccttggtcgtgctaatgtttcgtgtcaaatgtctccttccgtccagctcttcaaatccccaaatcacttctgcttcccatccctttgacgtattccgggccaattcttgaatgaccttgtcagtcaagctggccgtctccagaatttgacggatggagtcatccagtatgccagatttgtcgataaatttgagctgcatctgaatatctccaaagatgggcagcgaaatgtcttgcttgcttccatcaaccgaataactcccttcgctgtcaaagccgcctgggttgacagtttgtgtcatacgaagagtcgtgaatggtttcaaattgccggacaaatcagaacttccattagagtttcctcccgtgtgtgtgctttgtttggcggataggggagtggtctggtggatttgcagcgaaagccgggcgtatttcaacacctttcggacagcccaaggtacgccttgctattctttcttagtatagcgaaccaacatctcagttcagtattactcttaccaagataaagacgtcatctggatcggttgacagctttcggttctaatcatcatattagcccatccgttaggcaaatatcaaatggagaaaacgtaccaataaccaggttccagtaagatcaggaacatctttggaatcaggtatagccatcctcagggtttcagatttagcaagtaagttgggaatagttctttccttattttattttcgaaatgtatcactctggtaatgaggcgagtcgttccttttaatagtgaagttgaatattctctactccatcccagggattgctacatggatgattctaaaacaacatcggactcggactcggtgtccgaacagggaatatcgagtgcaaatatccattcatgcacagactgcggtcgcccatcaataaaattcttatgggttgaagagatcgaacgcagcgtggcttctgtacctggttgcttactcaggggtaaccctacaacaccctttattcaccgagtttgtgataaccatgagcgtgaggacacactctccaactctatctgagagttccttcatctcatctctagatgtgttttcaattttctttttgattaccctacataaactgccaggtcctaaaagtcaacacaatcaaggagtaagtagatattttagaataccgaccaggatcataaacgataatattaaataatcactggttctttaacaagctgccgcaagcactccattatttccattaaagacatttcacaaggatcttgttcttgtgctatgacaatgtcgcggattgaatttgaccaatctttctgacggattgtctcagatcgatcgaactctcgatcttcttgggattggcttgggcctgaccgaaatttaagggctcggtcaagtttacccagcattgtagagctgaattcaaccagtacttgaacttgggcaatgagattcccatccaaatgaaactgcccaaagtgtaccttcggtaacaacagaatcgtggctgcatcagttggaggaatgatgagaaatagctggtacaacctcatgaacacagcacggtatatgtgaacaagtgagcaatgtgcctccaatattccaagccacagtgctatatcgaatttcgggattgcacgagttgtcgcttgatccggagatgtcgttgtggtatgatacccagaatcatgtggagatactgtggtgacatcttcatccaagccatttccgccattttccgagaagataaacaaagagtcttcatatccgctgctctctgtttcaaatcgctgtgtagcaaacgcaacatccaaagtctcctctgtcataccacacgaagatcgaacaattgccaaaagccaagaggagtgatcaagcagacgatatatcggaaggtcgagggtttcaattggcaaattagaattttcatagaaaagggatgaagattccagaagcatcgacccagtctcaaatatctccaaatcctcaagaagttccaccttcaatctcaacagactcttacgaatgtcttgtatggaaaggagagcgccttggcttgttgtatttgcgggcggcttccttatagtttggtgattcacccatgcaggatctggaaattccttcattgcaaagggcgattcgttctcaccatggttgagacgtttggtttggaagggctcgtaaattgccatctcagtggcttgcctggcacctagtggagcatcactagtgaagactgagggaagccaagaattcccctcataagcgtacatttcatctgatgggatccaatcagaagactatagtaattagtagtcagtaaatgattactgttgttttcctcgggctccaacttactaggttataaccatcggtcgatgaatttgaatggggatcaccccaatgctcaacgggagccatgatgtttccaaagtctaggggcatattaaacccaacctccaccgagggcgaatggaagctgcctccaggaaagcctggcattgacgctactcctccccagttctggtgctctttcgtgttgtatctccctgggattggagagggagaatgcagtaacttcttcactctagggccggatgatttgtgaagcacagacattgattgatgccgttggttgaatctttggctctcacggtcctctcgcgcaactatattatgaccatagtttgagggtaatatgaccggcgcaggctggttcatacttgtgatacatatttcttgggccttaagacatcgttcacaagacatgccattcatatgatcgcgctcgcatcgcagcttttgcccgcgacaacgatcacaagcggaccgtcgagagtgccgataattgtggattgaatgcattgtaaagaaaaaaagagaaacgagaaataacgttccctatggtagccaacgagataccattcatgggaagctaccaagcgcaaatatgtacttcgttcttgccccactgaaattggatgcaatacaactgtcaattggtttgaatcattctcatcagcacatgtagaaagacttcaggctcaaggaaagacagttctattcgaaatcagatcctaggaaaaaggccaggagaaaggctagaaaagcgcgtggtttggtatcaccacgcctgtacacctctctattggaacatgatccacatcatgcttgaacatgaccttattcgttggatactcaatttttccacgcccaatcctaaagtgtgacaaattctcagctcatagcaacttagccctctcacaacatgtgtatagacatgcgtacatgcagacagaagtttaagggtatttttatcgcatccatgaactgaaggctgaactccagagtcccagtacgaggtgcgtcaggctttatggaagatgttacaccatgctcaaatgagaacaatgtatgagagagcagatctgctgtgatacaacatggaggtggataatgtttcacatagatactaccactccgttttatgggttggaggccggcttgacgccatagagcctaatcattatcaatgaaacatagactaccataaaataactaatacccaataaagagtagataagttcgatttggaagatcgtagttcacgttgagcccagaccacatcgacattcggagaattaagggcccagctcataatctgcttgacggttctgggcccctgatattttcttttccccccctctgctagatttcatattctccctccacatccttaagtccaccgattagtagtattccagtatcaactgtcgaggggcaaaaaatgcaaagtaaggggttgaaagcctgactatgctcctggccagagcgcggctggctttcaaacactagcaatgtcgacggattataggataccaaaaggaatattaggtataattcgaggacacacatatccacttcctttttttattactgccgtgtagaaccccgtgcgctttatctttgatgtcaaccctctaggtattcatttacattgaggctgcgagccgcttatatcctggatttgcgcctaatatatccgccagaccagcctcagatgggaaagatccactataacaacttgaaattttgtcgtaacttctctagttgtaataagccacttcttcatggaactcggttataatcagacaagtattcatcgatagaaaacaaagtcgaagagccttcatagggagtttgccttctgcccagtgtgtccattccactcctttatcacaacgcgaactccccgacttccttttcgcgggtgaccattgaacatgtctcgtacgattcgaacgtcatctactgtagtctcgtagagctccatctcaaattctcggaaaatggtggcgattgctagaagaatctccgcccgcgcgaggctggttaacagatgctagttagtacacgatttaaacagaacaatcaaggaaaatccacatacggaattccaatacactgtctggagcccttgctaaaagcaaccagatacttctcgaggcttttcctctgctctgggtccatccatcgctctgggatgaagctttgagagtttgggaagatatcttcattatggtgcataaatatgctggtcatccccaccggtgtctgatgtatattgtcaaaaagaggcctagatgaccgcaaaataggggaagcagatatcgtaccccgggaggaatgatccagtccttgtaagtcataacttgatttggagagctgcgctgaagccttgttgccacggcattggtgattcttcatggaggtcaaataagaaaacgataaggatttgccaggggagtcaagaaacagaagtcttcataccttaggccctccagcataacagatgtctattatattatcagatattttggcatttcatgaatcgagtttgcgagcaaacaacttacaaggtacggcattgcctcgtattccaccaaagttgcggttccattggggtcgagtcggttgagctcgtcccgtagcctttgtagcttgtctgggttgttaagtagatggaaggtgagtgttgtcagattcttggcagttgtttcccctccagcggagatgacggtgaaaacctcttgactcaggcggccaggcgccttctcctctgggggaagcttgctgtctagcaatgcatgaaacaatgtgcctttcggcacactaaccttatcatctgtcaagtttgcaccggcggtctggctagcaatgatcgattccgcgagtcgcagactttccagtttctggtcaattaccgggccgatgtgagggttaatacttacaactagccaccgtggaagaagctcaaacaagccgaatacccagcgaaactgtttgaattgaaccccgacttccacaattgcctcgattgtctttgaccactgtggtgtaaaatcagggtcgtctaaataatgaaacgattcacccatggaatactccacgaccacgtctgtcgtgtaggcattaaatgcatgataaacatgtagcggtgtctgtctctccttccagtttcgcattcctttgcgcagcttatctatcattttccggagcatgggctccaattgtcgaattcgctgctgagaaaagaatgggttcatgggttgccgacgtatccgatggtggcggtgatcgactgagccgaaagctgaggccggtgccccaaacatgccagtcaaatgtaaggatttgtttctcggtttgtctcgagagtataagatttcatagtactctgggtcgtcgatatgaagttcaaaggggctgattctcacaatcgggccgtatttgcgatgcatctcagcgattcgaaaagtgtactggcccccgaggaatgaatcgtaatagaactcataccacattgtcagagcggccaattttggtccggggaaatgggcgagtggtgaaaaccatagccgatatgttgccaaccacaccccataggtcattgcaagcacccccagggccaggatgggctgtgcgacaatggcattccaccaatccatggtattttgatttggagagaaagaagagactcgtagacgaggaaagacgcaaaccctgaccttccagttcggggtgtcttcttgaattgttgccccacacctgtcaagacagacattatgccactaggtcagataatggatacaaaacggtgattggaatccgtcctgttggtaacttcgagcgtcgtatctttgtggatagggaaggatccaacctatcgcggcacatccgtaccaacagaaatagctaatcatatggatattagttccactatgggtctgaagaatgtgtccagagcttaggatcatccatttcactccttctaagaggtccggatttatgacatccaagccccgtccaagggcacggggccgcgccctcggcggaaccttcaggatctggacaaagcgttaaaactgccgacagctgaagaatcataatcgtaacgatgaatcatgatgtacgacgattaaagaattgttgtcgctttcatttttttactcctcattgtactccatgcattccctttgtcttcaaatggatgtgacagatctgtaggttcatgtgggaatattcgaaatgcctcatagacaatgcgattgttcgaaattgcatgaaacaggagacacaataattcttaggtatttttatcattcgatgcgatagggctaccgtaatatcacaggccgatcgaaccttgaagatgacttggcttggacacggcacagtcccaacaaagacggcctaggagaccgtaaaataaggggttttcacacaaatcgatttatattgtcgtataattccatacagagtacggagttcatgtgcataaatcagcagatttgctccggccaataatatgtacctcgtattctttgaacatcctgcacatcctttcatttggcaagccaccacgactcatcctgcagagtggggaggtgcggagctcccgcacttccgaatttgtctaacattaaggggtttcatgacttttgcttcaaagtccaaagtacttggtagaaatatggaaacttcctatgcagactaaattggagagacaaattgtatacaactatcggtaatatcatcgaaatggatttcgacctccgagcagaccttgaaaaatcagcaatcgcagctaaggcgcgtaccctaagaaaactctggctgttagtcaggctactcagttcccgttgagttgatggcacaggtggagatgttgagactgtatatattaaagacaagctgggaaatggatcgtatcgtggcggagtacctgttgtccaaatcccagcgcccgcgtgggttgagatgagcatcgtgccatgtgtactccgtaacttctaggtaaatcgataacgctgtcaagctgccgacacgagcaatccgggtacgtcctggttgttaagacattgctgaccgatcagattcacggagatgatggatattctcgtcattacccctttgaacatgtcgttcacagaggagattcaaatgcggaggattggagcataaattttcggatttgctggcccaaagaaaaatgagatggaacgtgctgagcgtttggaggccaaaatctgatttgacctcccctgaaccaggtacttcggttcgggaccaggccattctgacagaagtacagccgaatctgcatcgacacaggagataggagtacgtagttacccgtaggtaataatagcaaagtactaggtatgacacatttcagaagatctctcgcatcattttgtgtaaatatatgaatgcgcgttgtacggagttcggagtagtcaccttgtgtactttttgtggccggaaatgccaggccggaaagccacgtggtctttatccttgttgccttgttgcctggtttctagagcttcaaatttttttgttcatctaccgaggtcttcccgtacaagacaagtgcatacaacatacggagtacaacatacaacactattgtgtccacgtgtgggtgctatttagttgaaatagtggcctataccaccgaagccgtttggaacatatggatagtgcaggtgcactcacacaggtaatataagtcttcatgtccatatcttcttcttgggaatgaatcccaaagattttcaatgtgaacttcgttattaagtagttcctaaagacctatacctctctttggctgttatttgcctttatgtctatgtatgtatctccgaaatatcggtacttccactacaggtaccatttacaatgtcttgccttcctttccgggtggttcggtgcatctgttacctaaaagatttaagaatttttacctctttactccacccatggatctcttcaaggaaccccaccgagttcgttcaagcctctgcagaatattttcaactctcgacaatcgtgaaacggcataccggtgaccttagtgacggtcatcttgttcagatcccatttccaatcggatacaccctgtggcggccctgtgatgtccgacatggtgtcccacgatgcttccgcggcacatgataccaaaacatctgcaaatgtgatctctgtagagtcggacaatgtttttcgagacaccaaagagtctgatgccgagcaaaatcacgcggacacctccaactctggggaactcaagcgcaggctgaaaagcaggcatttacagatgattgcaattggtaagtcttgattttcttggtcaagatgggttatcgcagatgctaactggcttcggtcgcaggtggaactattggcacaggtatactatcttgccctcaggtcctcggctagcaaatccagaagtctgacctatccaggactctttatttccagtggtactgccatcgcagaatccggccccgcgggcgcgttgatcgcctatatatttgtcggctccattgtctattctgtcatgagctcgttgggcgaagttgcaacctatattccaatgcccggtgccttcacatcctatgcagcccggttgatcgacccaagtctcggattttccatgggttggatctattggttcaactgggcctccacatttgctgtcgaactaaccgccaccggtactatcatccaatattgggatccaagcctaaacattgctattttcatcggagtgttttgggtgttcatcacggctatgaacttcctccctgtcaatttctacggcgaagtggagttctggttctcaactatcaaagtggccactgttgtcggcttcatcatttttgccatttgcatcgatgtcggagttggggagcagggctatctgggctttcgctactggagcacgccaggggcttttgccacgtatagtccccatctaccggtatctgtaggcaagttcgttggcttctgggcggtgctcatccaagccggattctcttatcaaggcacggagcttgtcggtgtggcggctggagaaaccgaaaacccacaaaagacggtcccatcagctatccgcaagacgtttgttcgaattcttctcttctttgtcttgacgattttcttcatcgggctcgtggtcccctatgacaacggccgcctcaccacggcgaccaccaacgcatcatcctcgcctatggttattgcagctgatttggcaggagtcaaagttcttccaagcttgatcaatgctgtgctcttgtccgtggtcttatcggccgcaaactccaatgtgtatagcggcagtcgagtcctcactggattagcacatgaagggtttgccccagcctgtttcggctgggtaaccaagcacggtgttccgtatattagcgtgacattcaccgctttgtttggcttgttaggtttcatgaacgtttccaatgacgcagggcaagtttttacctggctggtgaatctttctagtgttgcgggctttgtgacttgggcctccatcaatgcgtgtcatatctcgttcatgcgggtattggcaacccgcgggatttctcgcgatacgcttccatataaggccgtcttgcaaccatatctcgcttggtatggtttgtttttcaatgttcttatcgccctcacccagggtttcacttctttcatcccacatttccgggtgaccgacttctttgttgcctacatttgccccatcgtctttgtcgtgctctatattggacacaaggtgattttccgtccgtcatttgtccgtgccgccgatgccgatatcgacactggccgcttgcactatcaaaagcaaatcgatcctcccatgccatggtactggcgggcctggggctggttcacaaattaatacagcatagtcatccataagaacttttatatatgatttgttttgacatgtaggcatccatagatggatatttgcagtgaccctacgtaacaatgatttttcatacatccatgagccattcttggaatcatgtatttatcatgcgttgtgctcttaccaataatcatctagaaggacacctagccccagattctgtaaaacaccctcgaatctccacatgaccggctcacaaagcatcgttgtatgttgccgcggtttttatatccactttaagtgccgggccaccacagataatccgcctatcaatgcagttgcgccggtgcaaacaacgagtgtcccgtagccagtgccatatgcacccaacgcatgtcctcgccagttgtctgccttgagcagagcctcacttagggggccacttgccacattgccaattccacgccctgtttccatgaatgggaaaatgacagtcgcgtctgccaatggattggccttctgcacctcgttggagacacccgcccatgtggaggaaaagccacccgcgagaagaccataggcgatacaaaagacgtataaagggggaatagtggcagcaaacccccaaacaaaaaagactgcgataacggtaccgacagtcgacatcaaaatgcaggtagtgatgtgatatcggtcggaaaggaatcccatgatgacagaaccaaacactgcaaacaaattcacgagcattacggtgagagacgccatgtagtcagtcgcacctagactgcgtgcgtaggtcggaaggtatattgtcggcaagaagaatccgattgcttccagcgtgttgccgagctggtaaattataaaaactttgttgtataagaatcgaaaattcaaacggtgatatgcaacttctgtcgtacgcagcctcggtcgatgaaagtagagaaaaggcacagcaagaatgaacaatgccactgaggatatttgaagcgtagcctcaatgccatactggttcaaaagccactggatggcaagtgggaagacaattccggatacaccggacccgccctaagacatatatcagttcgactttccatcagagggagctcatggtgcagaattctgtgtaactcacccagacaataccaaaagccagcccttttcgtttatcgaaccactccgacatgaataggatggtgggagtataggcaaagcatccaccaattccgaagccgattccttgtgacaaaataagatgcacgacgttggtagagaaggaactcagtgccaaagacaaacacatgataacaactcctatggtggacacccagcgagcaattttaggcactaaaatcatcaaaattattgccaacggggcaatcagatatgcaataccctatatgttgtgttagcgagagagggcgaccttgagtatcttgccaaccaaccatcgcacaagtgccaataattgcaatgttttcggatcctttgaatggctcgtgtgtactataatagtcttggaatataccaaaggcgaatgcataacctagtcgcgtgttagtttcaacaaaaatccatcttcgaccaagaacaataagaacgtaccccaaactagagcttcgagcattgcagatgccataagaaacagccatgcttgaactccaccatcaaccggcggcaacttctcatcgtctagaatgattctgctgtcggactgttggtcgaagggtatgaaggatgtactccggctggtgaaactaggagaatactccttaggctccatgatgcaaaatgacccacgattctaaccacaggcgtgatggatatctggaagtacaatgggtttgtgtgtggaagccacggggagaacctcctttgaaaagggtttatattcaatgcggccgtttgacaagaaagccaggatcggcctagaaaaaagaaataagctaatggaagctagctgcatgacgaaataaatctccttgacaagaatccacccaattggagtgcaaagaagatagcgcaaaaccacatacctggaatccaggtagactggggtcccaacaatgtgatattgaacccctagatgtaccgatatggtccgtttcaaagtcacgcgtccaaatagactgtaccgtggtgatctaggtctttggttgattctagtaaacatctcctcggtggagaatgtattctctgtcgttcttcgctcgctgctaggacattaggcagaatgtttcaagttactgcaattcgaggccgcgtcgatcgggtgcgggatctgctccagaaatagtccgaatgaaatgacaacggtctcccctagggctggcagactgtttaggtgcacgaaccgccccgctcggcggataaaatgggaaatggaatgttgatcggggatcattgcatagcagagctggtgggctcggagaattccatgttgataacaggtttccgacccgctgtcattggcagagataagaaccaaaggagactcacttttgtcctaatggatgaagcttcgtcgctgtgtagatccaatcagtatatatgctcccatttctaaatgaggtcatgcacagacgttgactctttgaatgcgttaaactcgtttgatactaccaaatgacataaattccagaatcacatgtctttaataagatatcgtcagcgaacgggacaataaacaatatacatacaatgtcatacctcttcgaacgctacacggaggggttgagtgacattccagccaacggagctactacatgttcttccattgaaccagatagcaccgtctcctggcattattagagattccactcttatcacagtcaagggcattaatgtccatcaattcttcacaaaccagctcggttcctatcatggtctgcgggtacagtcatcgtgcattgagtcccaatgctttgttggtggcggaaaacggctcaaatatgttttggacgatcgaagacaatctgttggtctgtcttgttatttaaatgactgatgaggttcatatggcacatggtctagatgatttgagaaggaggtcagttatgcccacttggacatctgaggttgtttacgtaatctggtgattccgggtgcaggagaccatcttgctcacattttgaacaaccaccgtataagacattctatgtcgtcgaatgaattttccaagatatatagcctcagttctgaccagctcaacaggtaaattacgccatttcataatggatttgtaataggcatggtccttctattctcattctcaatatcattgaattgaattgaattgagtcgagctgggagttccagactgcgactattgacagaagggagttaagtctgtagggactcatatcccgaggcgatcgaagtggaaagtgtattgctcaccatcccgagaggcctccgtataggtcagactgtcgccagcaggaacgtcagttggaggcgaaacatgatcagcaaaaccgcaattttcatcccaaggcagaatgaagagggtctcatttcacgaaggcgaatgtcgcacggcctcatagatgctcttgacgaagacctcgtccatattaatgggggatggaggatgcattgacatgtaggagcgacactcggggttgatccaagtaaattgtagcagaatcccagctttggcatcaatatagaactgggaaatcggaatgacgttatctttgccattcttcgcaatattttgaatacaaaaagaaaaagatcagaagttcctagtttttgtgacatatgatatgatttaccttctgagtgatcagagtaagtggtggtatatatatcgtacaatatcatccaagtattcatagtgagatcgggtgcattagcggataaccccttgtatttgctttatagaaatgttcaggtcaccgcatattcaatggctgcgctgtggattttatacttttgttcgaataatcattttctgtcttatgactatcattttacttcattttgcagactactagagttttgcatgatgagtcgaactacactgtcccgtgaagaggtcagctttctaggtctcggcgccgaaagcagcaccatgggagcagttccagcaaccccggtatccaggccgataaccgtcttggtattaatgaaggtgggattttgcttcgatgagcgagcttgctctaagtgcaccaacaatggccacttcaatttgatactatagaccaattcaagcctgacgtaatgtaatgccgacaccaactgccaacccccacgttttgaccattgtattccttcaaaatgatgactggcaaaatatcgactcgatcacaggaattgggtccttcgaagagtggtcgccagggctcaagaatgtgttgtgcccggtacagtcagggccgctgtactacagttagtgacagtccaattcttgatcggcacccgacttacgtgaagagacggcatggctttttcaaagacacgatgagaacgtccctgtgactcattagtctctctcaaccgaaacatggtaggtggaaatctatctcactcttcctcgatcggatggcaatcattcaatggcacatcaataccacggctcttatcggccgtttcaatgcccacctgcatggtcctgttagcatcagagcgtggacttcaggaagaacatacgcacgagtgttcttttgggattcttcgctgccgatgcagaaagaagcatcaagcttagaagcgacagctgcttgagaccgtacatgatgcagatgacaaacagaggtccgataatggtagtaatatgatggtactccgtataggatatgtactcgacggtgcctgcaagtaaaacgcagaaggtcaacgactcttccagcaagaagatgccagctgtctttcccattatcccttgcgtctgtttctccgagtgctagggttacggccaactgtatcgtgaggttcacacccttttttgctgtgatctgccctatggaatacggagcatatcgtggagatcagaatatgactgctgattcgcactgcacggagtatcgaaggttatggttgaggtgcagtgtcgatctaggagtacccttgaatcttgggtgattctgaattctatggatacccatagaagatagagcacgttctgcaagtaacgtgaattagttaataaatactcgtcaaaagacttctgaagtctccaatgtcctaaggagtggaagtggccaggcgatgtctcccggttaacctccacttcaacaacatcaacctcgattcttttagtcgagtctcctttctttgcattttctcgactacgctcctattcacaatccaacaaaaactcggcggtttcattatttgatgagttgattcattttttattggactgggacaaccgtcgcatgtttacgccatgagcgactggtcccaccctgacacgactgcatccaattccaccggtgctgcatttactccgccctactgaatgcgatcctcgcgagatccgcccaacagatggaaaggaagaagggggttcaagactcatatgacagcctggagctttaccaggaagcgattcgcctgctaagccccttactgcaaatgcgcgatcctaaagttgtcggggcctacgtactgctctgctatcttgaggataatgtctgcttgcgcgcaggattggcgccgtcatttggagggatgtgcggcatttttttacgccttcgaaatgaatgggttcagcagcggtcttctcgagcagtgttttggtgctacgcacgcattggtattggtgagaatccatgttgttacatttttgccacacgacagcgcatgcatccagtgcgacatcgggtcagtcgagttgtttttgatgcttcatggcagcatattggaggctccagggctagaggggagctccaatctagaaggtgccaagcctccagattaggaaggtgcaagcactatccctgaccatcacctgatttgatttgtcaccatgtttacggtccacgggttgccgtggcggcaggaacttgttgagagtcaaacctgacattcaataataaatgctacctaggaaatcatgatgaacaatcgacacttggcgcaactacggtttcttccctgccaaacctcgactcttcttccattcgtccacgattccagcatacaccgaaggcctatacaccccggtcagctcagtgtagaacccacctccgagccggtggggattcagtcccaaatcgcgcagtagcaagtcattgtactgatcgaatcgttagattacgatgtccttgtggtttcacgcaacaaacatacctggatagcttcaacttcaaggccagttcccgtcaatgaacccaggaccacatcctcggagatagcgttctccataacctccagcggaatattcccaagcgaaaaagcctggtcttggattgacttgatgtccgcgggggagtcaagccctcctgttaaaaacgccgccacccaaagagcttgaacctctgcaacaacagcaatggttgatgataaaatcacaccgagcgttgcgaaggagcggtcacctcgtgcgactaattcgggggcaaccatgcggcggaacaagcgatatggcaccagcctgtgagattcggcccacgagggaggactccgatctgtgagagcgcatcttgtcgcattcaaagttttcctgaccataaactcggaacattgatctagattgtcccagcgttggatacggtcattcatggttgcctcaagcggcccattgattctctctggtgtttccacgcgaatttcacgatcctctcgaagatcctcgccctctgagtccacgacggctgacaaccccaattttagacgaagacttgcaggtttaaacctaatcggcactattggcttatatccggtggcgtggatgaccaaatcaacttcatcaatacaattgctgtctgccaagtgcaccgaagcttttgtgaatggatgcgtggtcttctccggcctggtagcgacaatatccatgatggctgatcggtaaacgttgacatggggtaatctaattgtttcccagaggtcttcctggtttgcgatgccaataccggatgcgcatgagacaacactagaaatcatcagtcttcaagtaacacaaatgacctctcattagacttacctgttctctgggcgaagcttttccatcttcggacctgagccatattgcgctgtatcctctaagcctttatcaattgatcgccagagccaacgaatccaccatcggcctattgggttgccatggaatagccgggctagccatgagccctcccaacggagacccccgggtccgagagacagacgttttggagtctcatagcagcatggggtgagatggctgagcagtcggctgctggcagccttatcacttgcaacggtgtcgccattcgggagagtagaccttggcggtaccatctacgcgggccctacacctcgatcacggatgatccagtgtacctgaacaggatttttctgtgtggacttgaggtgcaactttgggtcgttgcgatgtagagttgcaaagaaatgcaccaggtcaaaggatgattttgcaccaccataaataccgaccgagcgcaattgtgggtgaggggaatctgtgactgacattttaacagccccggactcaggtgctttcagtggctggtatcccaggtgttttcgagcccagtctccaatatcctttgcatggatgaccgggggagggtcgtcggacgccgttgatgactccttcgtatcgggcatatttggcaccgaggtcagtcctgtagccaacaccaacttatcgcagatgatggtgacgcgttgactcggcgacgtggacacactgatgtcgagcttccactctttagtgtctagacggctgatgtcgtcgacctatcgatcattcagaaaccccgcaattttagaatggattgagagtatcttaccgtccagttcaatcgtatgtgttttttcagctgccatttctcagcccattcacggagataacggttgatcttccagcccgcaatgaactgattctgtgtgtcatccccttgttcctccggaacaacgttggaaagaggcatatcactgaattcataaagtccatacgagttctgactcaacaaatttgggtaaagacgctcctcggcccaagtacctccaatatccgaggcagagtcaatcacaagaaggcgacattcggaggaggctgttggggaagtatcgatgctcttagtgaaacaggcagggatttccgtgatttcatcggtatgttcggctgtgctttcgtcgtcatatgccgcgacaagttgtagatacgtcttggctgcgatgagaccgtaaagacctaaacaagttagccaacgtccaatttagtcgtcaactgctaccaaccggctccaacgatcacgactcgttccatggctaaaatgattgaagagagagaagtcaggggagggaaaaagacggagttttaaatcccaaagtgtacaatgaaaaggtaacaatacgaagaatagctcggagctgcgaggattttgatattgttcttgtggggtcaccacaacaatgagaattccatttgaaatattgaaagtagtattttggaaatatcagacaacttgtaatggaaatatagtgaccgacatcatcttctgatggtcagctgtacctcgaacaggccgaacagcgcgattgactggcctaaccattctacacgtccagaatcaatgcccatgcttgatattgcaaagacacgcctactcacttcaggcgatgtttagatgggtcactaccaatgttgtaggagatggaagataatattcctactccataccccgtaaggatgtggtccccacgcaaatgttacatatttggtctttgtgggctgccgtaccccgtaccgctcgtgttgttgacctcgtcatctcgcgtactccatacaacatcctccgtacagcacacattattacatcgacaatatccatatcgatgtatcggcctactgttcccgagcatggagctattttcatatgaccaagccccaaaagttctatccccgatgtctgccttcgcccgtgacggggtcatgacttccgcctgtcaactatataacaccccgggttttgatgctcgctgcgggataggttgtgggatatctgcgcctcaccccagatgaagtcactcagctcaggggtctttctatctacttcactggctgttttgccttccctcccatgagctaactaggtacctgaagtcgcctgccatagtttcggttatactcgatcggagccctcggtcacatcggcaccgcctagcccggcagttgcttcacgggctaatcacatctcggccgatggtttgaaatccctgatggccggatttatggatcttttcccgcacctggcatcaagggactttgaaaaggcggggatttgctgtacaacggacattccgaccggcgatttcatctttgattcccccttggagcacaagcccttgtttattgctactagaggaagcgtgcagtaagtgaacccaagaatggacctttttcgggggatgttaactaacattctcatatccagtgcgttcaagttcctgcctgccttccgagaatacattgtgggaaccttccaactcaggctttcgcgggagttgcttgacaaatggaagttccctacgcagtcccgtgggcgtttccaggagatattcaggggagatggacgtcgtggaggaccagagcgaagggagttgactgctcaagagctcggcacatttgacccggcattgaaagattgaaagctgcttcacccaggccaggcaagatttgaagctgcgaaggacacaatccaggcaatatatcatgttataaagaggagcagttaccaattttcggagccattacataccttgaacgaaccagggcacgctaatgatatgaaaacatcagaccccttacttttcttcaaggccacgaaagacgatttgaatgatagatggcccgactttatttacctcagccagtcaggccgaggcttcattgatggattaggatatgcagtcaaggcttggaaagttggttggcaattctgatttgagaattgcttgcctgagaggacagtactaaatccgagaagtaaaaaagacccgaattgatgcgctttcttgtttcgatctccggatcattcgagagatacccggggccttctcatttttattcagatattttgtattttgtgatcaatgaggattcaaacagtctttcattcgcgagttcggagagatacgaagcttcttccatttcatggagtaaaagtgccatcagacatttccaccattaccttcacgaggggacacaaactctgcaatcaagatattcgcatttcaatacagttcctacattgtgtcctggaatgtcaaaataacgaacggctcatcggggcccattcgataaactcatgaaccgctcatgtgatcggctgaggcttatacggggaagttttataagttttataccaagatatcctgcctccagcctattcgtccaaaaacaatctgatatctatttccaagttcggtagctatcacgatctagcctgttatagaatatcaaatgttttatcttcatatgcagtacaacgtatgtaacaagccgggcaggaaacccgaccacccgagcggcgttcacccttcgcggaaattgcagccgattgtctctctgatcgtcgtggtctagtgggaaaaaaaggttagacgatcaacggcttcgcctccgctccgatcttgtgatcggtcgaaacccgtagaattcatatcctcattgggaagtatgaactcatgatcacgatggttgtcattgggatcgcgatctatattaagggactcgccttcttctgatagagtttcaagacaaacccattgcgctgcattcctccattgcagaaagacttgtcttttaaccttcgaaatgtcaacgctcaagaattacttcggacttgggggaaccgacgcccattctacccctaccgacaacaattccccggctcaccctctcccttcctcgtggtattcttcgcaggatatacatgaattggagcgacgcgccatattctgtcggaaatggcttctgatcacgcacaagttgcgtttccccaaaacaggcgactggctccgatacgacatcgccgggtacgcttttattttggtgaaagaccgagagggaaatgtcaatgctttccacaatgtctgtcggcaccgtgcattcccagtggttaccgaagagggtggtacctcccggattttctcttgtcaatatcacggatggtcctacggccttaatggcaagcttgccaaggcacccggataccaagaggtggaaggttttgacaagagcaagaacggccttcttcctatccacgtccatattgatgtcaacggttttatctgggtcaatttagatgccagcgaaaagcccgagatctcgtgggaagacgactttaaaggagtcgacctacagccacgtttcaagggtttcaacttcgaggactatgactttgataacaccggggagatcagtggagagtacaattggaagattatggcagagcactacaacgaatgctaccgtttctcaacgactcagtccgacacctcggtttccaatctcgattcatacgccgtggatgccaaatccacacccgaggagattgcaaatgggctgaagattgccagcacttactacttccccaatgctactatgaccgtctcgtgagtgtgattgtccggcaatgtaatccgattgatgctaattttgtacgcaggccacacttcttcttcatgcagcgactcgtgcctacgggccccacaacatgctcagtgcgctatgacgtttaccgcaacaagaaatttagcgacgaagagtttgaaatcatcagccaagtgtacaagcgcattatgtccgaaaaccaagatcgctgtgtcgaaacacagaagaatatcaacatgggtaaaatccagcccgcggaagagggaccggtcaacttccagactgtcgttcgtgacctgatcacacagcaccataagcgggaagaagatgccggggaacaattttggcctgcacgacaaagactccccaagggagaggcagtcagcaaagaggatatagatttctgctctaagctgagtaaggatgggtcacctttgacctcggggggttgttgtggaggaggatgtggagctggacctccatctagggcagcaacagcgccggagactatggtggtttaacgatgtgcataatagcgaatgtttcgttgattttttagctctgaattgttcttatgaagatgacatgttacatgcacaggtataaactcaaaggtcatatgaatatgtttatgatacgtaggattccaattttactataaaagagaccgattatagcagtctacaacacacttctgggtgactagcccaggccatttggatttggaagtaggtcgcaaatgccctcgtccatacaaaaactcaatattagtaaaagatagagaggagaatagcaaacgggatcatttaaccctattcagtataaaagttcaggttacatgcacatccacgcacgtagattaggtcgggggcacctatgaggcgaggggaagaggaaaaacctcccaaaagacgcccttttccccctttctccgattactccaagataatctcgttattatctcctaaacatgcccctctcttaaccttgtcatgacgatctccatctatcttatctcttaactagttatcttaactatcgtgcctatcgctccaataccccgctacatccgccccgttttctaatttccccttcaatgatgccacgagagagcgcgcgcggaaggctacgttcccacgaggcctgtcttaattgcaggtaatgcaaatacactgtctgtaagtagcgggtggtactgatctccctatagaagaaagaagacccgatgtccagccgagaaaccgtcctgctccagctgtgtccgcctgaatcagccatgcctttatactaccatacccagagggtctcgaggagggcaatctgtatgtactggcttctggctgtcggtgaccaatcattgacttttttttttgttccttacaggacgaccggctagcattcctcgaagagaaggtaaacctcatcctgagtggcagatcaacccaaacacttgcatcagaaaagtcacaggagaaggagataggaaatgcaatttcagaaacatgctatcctgccacaacacgtccaccctccattgaaccaagcacggtcagtgacccattcttcctcggttttggctacgaggactcgatctctcagccgtcatcatctgcgatcgccaaagctattgatctttactttgaatattgccatcgacagccgatctggtgttttgatcgtgaggaggtctcggacccaacttatctgtcagaggagctcgtttgttgcctactcgccttgacctcaagattctcaagagatcgtgaccatttacaacattatggagatagtgcaagaagcctagtcatgcttcggatggctaacggcacagtggagcttgaaaccattgagagtctttgtctactctcttattcgtcatttctaggtatgagcctcggctaccaagtcgagaggattccattgttaatattattctagacggagatatacacctcggtcgcttccatctcggtcttgctctacatctttgccggtcggcaacgctggatcttgaatcgagtcatggaggcgaaggtcccatggccgagcgaaagaagcgtctgttctggagtctccaatgtctggagcagtcctacggacagcaaaatgggtttctctgtatcccatcggaagtcctgcgtaccttctatgttgcctccagtagcgaccgcgcaaaacaagatgggacggaggcgaaacctccaccgctgccgacagacgatcttgggtgctcgaaaccatccgacatggggatttggagcttagcaactcattttggctgggtatggagcagagtgcggatatatgtctccgattgtgctcgaaataggctcaaagaaccctggcgaaacgattcaatgtacgccatggtgctttccgacctcacagaaattgagaacaagctttcccagtgccatcgatatgactcggtcaaattttacgagcgaacagcagaggagctgagatcgagccgaaactactggaccccatggctgaagctacagtttacttaccactgcattctaacggttctaaaccaccccttcctctacattgtggcatcacaatacaatgacaatttggcaatcccaaacgctttctggagacgctcatccgagttggtcttgttacacgctacctggcttgtccgcatgatagacatggtatccgagaagaagatgcgactgatcgatccgttcttcggacacgctgccgccattgcagctacggtgcatctatactactgctgtgccgcggatccccggctaaagtacaaatccaaggttgatttcacaaaatgccgaaggttcctgaagagttttgtgtccttttcgccagcttgtggggtcttggtcggtgtcatgaaatcaaaccgccgcttccaatgctaacaaacgcgcaggatcaaactttggacaagatgactcgaattgcttccgggtcggaaaatatcgatcatgactgggaacctgagaagattcatcttagtatacctttaatgtgggatgttcttcaaatcaactgtaaacccaagccacacgaagtatcgacgggtggtttgctacatccatcattgaccccaaccgtctctacggaagaggcggaggacagccctgcctcgactctggagattattgttgcgatgtctcccaatgtcacagttaacactgcggacggtggtcaagctgcgcacattccaccaaccaaaccgtgcatatcttccacgccagcttcttccggccctgatcttggcgagaaactcgttgcgccagctgacagtttaatgaccaataccccctggctatggacggatccctcgcaattcgttgatatggagaacactgtgggatacgcagattccgaatccgctctcggaaacattgacggattttcgacttggtgggactttggaaacttataggagtaatatgttcattgacttctactgcggcgttactgtcttcctaaggccgtaactcttgtctcaatccccgcatttatcttttgccccaaagcccctatgcaaaaaagacccttgtgcggaaacactcctaactgacccccagatcaaaaacttgatgcccacgcgtcctcgatcaagttatgccgctgcgaccgtcttcagcctttcttgcaaggcagcaaagttccgtttcatagcggtttcggtaaactgcgccccagtcaccatcggatatttcttcgagggcccctggattaaagaatccttacagggctggttgaagtaggcaatgctgtatcggtcgccaaaatagtcctcgggctcacaaggggccttgacacgatgaaaagttgacttgaaccggtcatccgaccaggacatgagtaaatcgccaatattgcacacgatctcgccagtgttggctttcaccttggtccattcgtccccaataccgaactctgtcaccacttcgcgaccgggacagatttccagcccatcctggccatccccttggaaaagtaaagtcaaaaagtcccaatcggcatgtgcccctgcgcgatgatacaccttgccgtcgggaacttccggcaaggcaaagtaatggagtagacgcatagttgtttgcgagttcggtcgtgagatgccatgatactcgatgaagaatctctcagggaatcccaggccccgtgcaaagcatcgcatcaaacattccgatacttgttggacgcgattcataaaatcaagacaggcgttccggaaaccaggcagatcgtcgtacttgagccagaggtcattcatattctcgccgaactgcaactggtatgactctttactgtcgggctgcccggtagacggtcggatttgtgagttcttttcccacccgacattgtttggattccacggtacagttgccttgacctcatccgatagatcgaagaaactttttgagatcgcaaacatggattgaatgtcttctttggagattccatgattgatcaaggtgaagaatccgacattctcggcggcatggatgagttgatcagtaatttcatcgatgcgatcttcaaagtcgtgcatcgagatacgtcgaatgactcggtcgacatatcgggtttcagatgccatgtctcttagtagtccgggaacttcgcccatgtgcacacaataaattatggaagcttttataggtcactcggtatcacgtccaatatacgtgcatgctggacggaggggggcttcgagctgataagcaagtcgagagctgtacgcggagtaggacgtcatcaataaggtatatagatgtagagaatccggacactctgcgttgatagggcaggattatggtcgaatcaattcaactcgataagacattgtcagcgccttgaaaggtcaaatcagaaaatgtacttcaggcactcggccgagttctcagcttccagggattggctcggactaaacgctgctcacggggtatcaaattatctatatgtccaatatgtccacatgtatctactaaatgccacacacgcaaaaacaatttgggcgagtgcttggtgtcaaaacagatagtgcgcaaaccttcaagatatggctctattgaaccttgcgcacttgggtcacaggtgaacgatatactcggcgaccgtgtacaatgtacaaaacaattgcaaatatgaccaccgctccgaagacaaggatagaccaattcatatccaccagagtcgggttattggtggttgggaagaaggtgaaaatgatggcaaagcaaagccaggccaatgagaaaacattgatcggcaatccaaagataccgagcgaaaatcgcgaagggggaataccacccggttggaaacggacccgaatgatggcagcaatcggcaggatgtacgtggtgaaaagtgcagcgatcatcacagatgcgacagcattgaaagccgccgtagatccgatgttgatcaagctcagtagcacggtaataatggtcgataccaacacggagaagatagggatctgggtgcgtcgattaacgtgagccaactgcttagagaacggcaaggcatcatcgcgggcaaaagcgaaggtctggcgagagactgtggcaagaataccaatggcgctgcaaacttccatgacaagaatgatagcagccacaccattagtagcagccatcgagccggttgcatgattaactgctgggaggaaggagaatccactcgccggggcgagtacatcctgcaagtctcccatcttatacagcaaggtgattagcatcacgaaacccagagcgccgttgatcaaagcggtcgaaaccatacaccacggcaccaccaaggcagcattctggacctcctcggctaagagacattagccatcgcgaaataggagagatatggcgtttgacttacacatatgtgtagcagcatccgggcccgtccaggaaaagatcggagtcagttggcccaccagacacgcgaggcccatgctcggccattcgccagcgtttgtaaactccttccagacagaatccccagaggcctgtcctggagacatgacccacatgaggacaacgacaacaacgaaaccgaagaggtgaatggcgaggatcagaccctccatgggagggagaatcttgtagccccaggtattcaccacagttccgacggcggcgatgccgatagtcagcagtgtcccatgccagcgctcaaagccatatagccaaccggagggatccgagaagttgaagactagcagtccttgaatcagagtaccgcaaaggtagcaaatactcgcaaacgcagcttgccagcctagtaccgaaagccatcctagaacgggattagcggtggagatcgtcaggttgtaattcgaggtttcggctaaccggtgagatagctcaagaatcgttggcaccttggccaggcgaattcactgacccagtgatactgtccacccgatgttggggagctggctagtcaatctccatgcgctccatgcgcaacatgcgagggggggggcggaacttacatggaggcaatctcagccatggagatcacggcggagaagaatccgacaaatgaagcaatatacacatagaccatgccggctcgtccgccatcaatcaagccgtatgtactcgtgctgcgccattctccattattcccagtgttctatcataagatcgcgcgtccaaactcacagcagaatcgactcccatgtggccatcaacgtcgttgtgaaacctaagatcgaataaaaacggaagtttctctatcgctgatcagtattgcgtccagtcctaggaaatgtacaactcaccttgaactgttgggtctttccaaggcgctgcatgtcccaatcatcctggtcggtcgcgtcgattccgacgtcctgcgacaacacgttgttggccaatgcttccttcatggcgatttagggtatagcaaatggaaaggaggaaaggcgatcagatcaaggccaaggggccccggagaaggtcataatcaaaggggggaagaactggggagggaagaaaagcgcgaaagtggagccgaagaagtctatttgctcgaggacaagtcatgctgcagatccctcatggatgaatgggctttatcttatgagtcgacttgtagatgtgaacttatagtccgtagcataaataagtaactatggcagattatcacacattgcagaatcccacattccagggatatctttctccacacaaggtcaagaaaatggagtaaatggagtatacaatatacactcgaatatgattcgatccttgcacttattaactccacagacgggaggtttcttcagcgcacaacccgctagctcatatggaacgaatgaggtgagctggagatgcattgtctatcaacgtgtacctatgagacattatcattcacaagattctagtttagacggtcgcactttactattatgttctcattttgatatctacaaagaatcgctaacggttatgattaatagaatagcatagttcaaagtacatatgttccattcatatatattcttgttgttgaatgatggttgaccgttaggtccgtttactctacatctaggtcgtgagtcaactattccaacataaccaatgcgcatgatctgttcttaaccggaagtactccgtacactcctttatattcccgacattcttccgcaatcaaattgtggttgctgtacggagtatacctaccaatataactataccctactacatataccacggcatttctaaatccgttcttcttccagttccaagataaaccccctatgttgcatgtaccgtgccaagcgcctagcatctgccgaattagatacatacccaatcggggatctagtgaatgacgaatcttggcgtcaaaatacgaaatatcatatgaattgcgtgtccttttttcatttcctccgcacgtatgttctagccttgtcttaggactaaaccgaatacagatattgagaccgacctgggggttgaaaaggaggcagagagatcggcagaagaaaagggaaaaaacggtagacttgcgattgagctccagatgactctgtatattctgaatctatttatctagttacaacatccgtggatagttcgtagaaacaaattgtcttatctgatccccaagatttgaccccaaccgccacatattaacgccacatcctcgaatacttggatgacgacgcgtggggctgatggcgttgccgttcccttcggcgcccctcggcagatattttcatcgctggttggtgcagacgcgcaattctcaatggaatttcgacccacggggagcttggcagaccatgagattcctacaagatgaaaatccgccaactcccgaatcgcccatacgcgtacgagctgagttccactgttcggatcgccaagaccgagtggttcctgcccaggactctttcggatagacggagaatcgacgtgaaaaggagagtgtcaaatataaccatgctggcccagcccctggctccgacgcaaaagactctctgtccgaatctcttgtttcgtccgggatgcgctaatgttcttgcggacttctgatagcgtgcttcgcctgagctcatggcttcgcaatgaccgtctgcatgcccgcctgcccttccgatggattgctctagttctcgccgccattgggggcttcattctattttatctatttgcgatcccacaacttctccggttccggttccgcgtcggtttaagctggtatgatctaggagctcaagggttcggtccagatcgaaattacaactccttcgatcaagagtcgcccatcgtcgaaatcactccgcctggcgcaaaatgcgatccccggtacacatttcttgcgcctcggggcgattcagttgcccatcctggtccgatgatcctggattccactggggaacttgtgtggacaaaatggaatgagggtacgacacaagacttcaaagtacagcggtacaagggcgaggactacctcacttattgggaaggagacacatccgacggtcatggacgagggtcatggtacatggtaggtcatacatacattgagctcgctcaccacaattccggttctctaatcacatcgtccaaatacagcttgattcgacctatacccaaaagtacgtggtgtctccaatcggcatgtatgacggcgacatgcacgatttccaaatcacttccaacgataccgcaatcttgataatttacgaccctatcccgatggacttgagctctatcggcggcccggggctgggatggatgtatgatggagtgttccaggaagtgaacctcgaaaccggagaactgctatttcagtggcgcgcatccgacttttaccacccgagtgatagttattatccgattggagataatggtcaggaacgggcctcggggtatgaccactcgcacatcaacagtgtggacaaggatgaccagggccggtacctggtttcgatgcgccacctccatactgttgcatgtgtagatggcatcactggcgatgtcctatggtcgctaggaggtaaacggaacaacttcgccgaggcttcggatcgagctgccaccgatttctcatggcagcacgacgctcgctggcaaggacccaaccgcctcagcttgttcaacaacgcagcctataataatgaaaacctctcggccgtgagtcgcggcttgatcgttgatctggatacagaagcgcggcaggcaacattactgcaatctttcgagcacccgcacgatatcaaggccgtttctcaagggaatctgcaagtactagacacagggaacgtgttcgtgggctggggtcactctgcagctttcactgagttctccccagagggcgatgttgtatgcgatgtgcactttggtgcctgtgctttcttcacatttggtcgtgtcgtctcctaccgggtgttcaagttcaactgggtaggtaatcctgtgacactcccggacactgcaatcacaccggagagtgtctttattagttggaacggtgcgaccgaggtagctgaatggcgagttgaggcatgggacggtgaagacctcggaaatatgaccttcacggctatcgaccaggtccctcgcgacgggttcgaaactgaaattccactgacctccaaggttgattcattcttccgcctgcgcgcaatcaactcaaacggagagagcctcggtgtaacagaaatactccagcgactaccatcgcaaggctctccccatataagcacatgggctctgggctgcattgtgtttgtggtacttggctgccttatatgcggtgtttactatgctgttcaccgtcgacttcgccagggatgtaatcccagtggcacgtatcaattggtatcatataaggatgaaaaccagggcgatgatgagtatgatcgtctaccattataggacgctggagttctagatacccgttctgcctgtacataacttggtctgcacatatttacggatagattcccatatatttgcacattccttcttcgcgccttttcttatttgttgccggcaggaatgtggtgaggatattccctcgctgttattccgaaccctgttcattcgtattgacgtcaccatatctgatatcaattcctcggcaagtgacttgaatctgcaggtcccgtggatcgtgaagcccaatagaacagggaggttgcggaggttcttcttcgcttccgctcatttcttatcaaaactcatttgccaaggctgtcaaaaacctcgggggaacgtaggggtagaggtgtgagactcgatttcgtggccgacgtgattccggatatcttgcctatctgagatggggcagtgctttaccgtttgagccgtaaatatgccaagaccggaccaccttccgactctctagatgctcatatgtagggtatgcaaatgatgtttgccaaaccgaggctcgcccgaaaatggcgcgtcgtgatggagaggactccgagaggtgcccttggcgccaagggtcacctgtgaatctgatgtttcagttgaggggggcgggtactcttggcgccgctcgcagagtcccgctcctaagccaagccgaggtctcaacgccggtcacaagaatttcccgagcagtactcaagcaccgtttccgcccctgaaaagccaccattgcttcaataccatccgattcaccttccatgatcaaatcgctggatgtatgattggcgaaagaaatgcctcttctccaccttttgtcgccaggatcaggatgataacattggatccttctcggcgaaggaacaattttggactcctgactcctcgaggtcaaggccaccgaagtgtcctaggcatgagtcaatatcgagtcatgaccttcagtcttctgtggctgaactaggaagtaggtacatgattgttgagatcaaggtatcaaggttttatgagtaccgctcaattcagagtctcttttgacgtagatggcatacctttctgtctcaccattacgttctacaattcctgtctggtcggttcgaaaccagctcattcttggctcctggccaagccctatagctatagccacattggcatttatatatctccttggctgcttctcagttattgataggggaatcaaaatctggttttgttgactacggaggagtgaaaattcagcagaacttttcactatagccatgaccaagatttggcattgccctactccgtagttcaattagatagtgaagtggatcgatccatgtacgtcgctttagccagtccacactttgtaactgaatcccatgtgcccacatagtagctttccccatgggtactcgttgtagcgaggaggtatgagttggaacccgactaacttcatttagaaacctcccagctcccagtcaagcaaccgtggtctgcttatctgcattgagggtagtactgttgccatcggaacgttgatctcatactggattaactttcgagcttcctatggacctcctgatttgacatggcgcttcccaattgctttacggtgcgttttcggcctttttcttttctaagtcgtgggccgccgaaaactggggttgtggttgcctgggtgtatagcccacgatctttcttttcgacgggaaacgcaggtgtcactcttttgtcttgttactacaatagtatactttatataattatttttgattctagggttcctttaaatggaggtaaaaaaagaaagcaatgaccgcgacttgaacgcgggacttcgagatttgcacttgggatgatgttagtattggggcgactaatcactttagaagcgaatatacatacatctcacactctaccactgagttaccactgcaggtgatgatgaaacgcaaagataataaactataatacgctaatccttaaaagaagcttatgtctttcaagctttagtcgttacaccacactcagcaactattttgttgtccataatcaacctacgggaaagcattttgcccagtttaacaacttttcactaattttgcttgacaccaactctgccttgtgacatttgccattatataaaatagagcctggccacgccactcgcaagtgggcatattactacttgacagtagtaaagacgggatttaccctccgggcatctagtgttagtacccattacctctattcctgccatagcctcactagacaggactaaggcccttcgactaagactcgccgaatttgcctaactgggagatgaaccaggtcagtcgtagaagcaagtgaattggctgataaagggattatgctattgcttgtcactttcgatattgcggccggagctgtgcccccggtacggccaagatagtggttattggcatagtccagcagccagagcttgagagtttcctcgtcattccctcacatactcgatcttgagctcttccttacaaattacaatcaacctagacatcaacctagtccacttaaacctatttttaggtccgtactacagtctgcccgactacaaactggaatgtcacctattaaacaattacatcgacgtatatacaaccctgctcccacctccacgggtgctaagatttttgttgcgtcactgtaactcgacatttgcgttgggagtggagacatcagacgggacctggggactgtcaggactaaacctaacagcgtaattcatcgtacccggcatttatgtgtagatcaaatcacgtaaaaacatcattcatttcctttgagcacccggccactcatccggtccttcggcttggggatgagagccctacgcggatgaatcatatcataggttaatcattttgagagttgcactaacaaatgcgaagttagaaagggagagagtaaagaatgatctcggtactggttagggctttgtgtcaatattagcccccttctgatgtgttgttggtaatagatagaggggtagagaggggtaattttatagacaggcctgcttcggtcactgtataaaatcattaagacgaccctcaatgaacctctcgattgatcagttaactacttgcgtaggtatatgtgtacgtaggtagccatgcttgtggaataaagaccaagtgctttgagcggcgatatgagcatcaaacgacatacatttctaccttcccatacatcatattgatctaatctaaaacttttagcttagcgctagatatcatctccagggctataagatcagtatttcttctcgtgtcaaattcgtccattccaataacaacatttccaaggcctgtgtcctgtctaaagacttctcaataaaagggccctcacataggttgtctcccccaatcgtctgccctggggaggtatttgattgagttttcccatgtgatgtgtttggatagattgccggtgggccgaagtctgatattgctttgagcgcatcgtggatccacggcacatttgagggttgatcatcacaagcgtcaacagaaattgctggtagcgctggtagttttcgaggtgtatccttgatctctggggaggcatagccttcttcacttatgtcttcgaatcgtggccgtttgagggcggatcttagttccagtcgctcgagaactccttcgccaatattcgttactcacttgacctcattgttcttttcctgccacaggtgcttcccattggtcgttgtgcgagaacctggcggcagacgggatcatccggagttttatcggtgtggtggactcggatatgtctgcaacgggtggtcaatttaatagtaagtgatcagttttgtcccgaagttttattcttttacttactaatgaagatgatatgaactgcgggttcatcgcacagacccgcgccgctcaaaccgtccagaaagcaatgaaccaggtcaacaaggctcgtgaccgattcacatcattggttaaagaaagggagggaatccaaagtgaagtctaaataggtcatggcccttgtaccagagtgggaggatatccaacaggataaaagaaatcgggaagcagctatgagattactacaaatctgagatcaatataactgaaattcgcagtgatttcatagaatcctcgctaggtagaaacagacaacccgtttagtgcatagcccgtttcatcaagcgatctgatggtctgacgttgcttccttcgccatgtgatgacttgcgtttcttgggtcccactaggtcaccgggaacctcagcttcaagcatcctgagaacttccgcgggtttctctgcttttaaagcaataacttgctcgttccttctctggttttctgggtagttttggtaagtaattacagagggcatgccagacctaggcgtgattgaaggctcaccatttccgccctttccaacctcgtgactaggtccatgctcgaaatggaaacaacccccagctatttccaaggcttgttcatctaagctgagacgatttgcgaatgattgtcgggatgcttcagggtcctttagagttttgcaggctggcaagtgtgttgacgctgaaatagaggttgaacgaccagctatgcttccaactgatgaggtatcacaactttcatcgaggaatcgctcccaccaggactctgcgatgatctcagtgtcgtcatcagaattcagttgctcggtcttaaaatagctaagttcttcttcaacgtgtatcacgacagggttggattgtgatagcggagcaggatcgtcttctatcacgatagtattggccttcgtgcctaggtccgaagaatcgatagaacccagtctgaacgcttttgagaaagttagcgtggtgaaaaaaaaatgcttctatgagatctctcaccgaaggcctcgtttgtgttgttcccggaggattccatgctgaagaagcgtttgttgatcaaagattgacttctgctctcttgttctattaagaatttcgtgcgaaacaagtggctttatagctcatgcccgatcgatcacgccttgcggattctctagcgcagacagcgaaagtcgcaaggcaggatttgattcaaacaaactctgcctgtctgtcaatcgttcccatgcgcaatgcatgaagtatgaactgccgcatacctactcatccatgtagtccaatgaacatatcgaaagatgttgttcctattcttggaagccgtaggtctgcatatttttgcgcccagaggttctaagcctaggttgatcatatcctgcttgccaatcattctgtgacctgagagataagacagtatgatcccggccttgttcgttcttccaacattctgccgttacatcttaaaggcagatttggggacccgctccgttgacaattaaccggcgaatcggtgtgtgaggcggcaggtcgcaggtcaacgcagcggactaaaggcaaaattgcctcatagtagtcgtactggagcaatcaatcatgatatgtcaggccgttcctattttcagggtgatgcatgtctgcgctgggctagagcgcagtgttcttccaccgggccgactgggtcctgcttgccagtcgttcctcgatcatagactgaagaggagacgagactagcgcactaggccggagacgagaggcagcctcgtcgtctccagtccgcgtgacgccgatgccgtaacagtagacctatttccgggtccctccatatcatcctatggaccaatcgattatgaggttgatcgatggttgcgctgataagccgaattaggtgactgggggccaagcctgcgcatatctcctgaataaccgtaagggaaacgggtgtaggtcgggggggtcgacatcttgcacgctacctaagccgtaggcgattttgtatggtggtctgcaaactgagcctagagaacatcacggtcaggtcatagatcgttcgtgtcgtaatatttggggactccgcatgcactggccgaaaggaatcgcggctaggacagttctatcggtcaaataagccaccttggtcccaagtcaatttcattttgaaaatcaagcgagagctatccctcaagtgtgtcaagaccctgccgttccgttctttgtatgctgcggtgaattcgtagccctggtccacgtaggcgattgtctaaagcgagcgaaagccgcgccgataacgggaccaacgattgaccgacagataatcacattaggacggggaattcgtgggtcagcatcagggcgtaacagaaagcacctgattaggaatgaggggacggaaagttgcgtataggttacgagtcacacagggaaaaggggggtggcggagctcaggagctcggtgatccggatcaatagcaaaaatgcctcacctgcaaggcccagggattacccgggagacaagggcgaaaagaaaaatgacctgggttatttgttgggtggtggaacaggggagtatatagaaccacgcacggggaggcatgaggacaaagagcgctaaactgcaagtggacaaactaaactataaagcgtaattcatcgcacccatccgatatggtgtagtggctaacatcgccgtctctcacacggcagccgggggttcgattccccctatcggagtttattttttcctgacataggcttccacctcccggtttataccaccggaggatttgtcacgagatcatttcatgagacggttttgcaagttctatctatcttaagaccctggcaccgggcttccattcagccttctcgagcccttttgtgatgcacgagacatgcgctctcgtgattggcccaattctttttctcttccatcccctcacttaggcacgggtctctacagcaatgtgaaagctgtcaggaacatgagggtcggttcacccattgagggaccgaatcgtgccatacaccacgttgacgctagcgagggtctggagatgctcgaagatagcatttgtggccttcgaatcaccgagaaagagcttcagacagaggcagctgaattcggcgctttgctgaaagacactacgaatcgatttgctgcattgagtgaaatgatcgaatctcccagtaagagggttctttctgtctccagattctatcgatgatagagagagactccggagaattagggcaattaataaactatctactccgtagttagtacttgcatcgggcagtgaaaaaaaaaaaaagaaagggaaaaatctggcggtgagccaggcggtcaaaatttcccatgggaggtcgcccagtacggagaacaaccttcaaaaccccaagcatcctgtcgtggggtcgtttcgctcttcttttcgcattcgacttcagtagcccgctgtcaagcgggcgtttaggcgcgcaacgttgattcctacagtctaaacagtggagatgacgtccccacatcccaaggacatcgggatgagttccccgcgcgaaaggtcgcagagtgttgcgtctctgaaaccgatagagctttcagagacagaacaaagacaaacacaaccagagactagagatcgaccacagtcgactacagaggttcaacagccaccaagcactgggtttgaccctgctgaccgtgtgttccctattcggtcggttgtttcactcgatcccaccgttacgccccaccattcgggttcagtacactcccgggacacgatatcaccaacccgagaaggggcgcgacagtactcattcattgacgaagggacatggaaccaaatgcactcgcagcgttcttccgaccacctttatcaccccgatcccgaacacgccgaacctaccatcccaaccggtattcctcgccacgaaacgcatgctatagatggaaaaacagaaatcgcgacacattctttagcatcggaagttgttcaacaccccgaaatttacgccaaacctgccccgagtgacaaccagtctggaaatgggtccaccgcgcctccatcctccaatacgcaacgcagaaacgccgaagaccatgttcatgttactgcccgcttcaaacatgtcatgacggacagtggccatgccgtcatcacaggacgagatgggggagcatttcaatattgcgaggatgagcccattcgcatacccggggcgattcagagctttggcttactgattgccctccgcgaagagtcgccaaatcagcttatagttcgcattgtgagcgagaactcggctgacttcttgggttattcgcctaaacaattgttcgagctgaaaaatttctgtgacattttgagtgaggaccaggtggacacactcttggatcacgttgactttgttcgtgatgatgcacacgacccatcaatcgacggaccggaggtttttaatatgtccatccgcacagctaatgggaagcgctgcaaattctggtgtgccacccatgtctctcagacgcaaaaggatttgattatctgcgagttcgagcgtgaggatgacgaggtgaacccattgaatgtcgcgggccttgccactccggcagtccccgcagacaccctaggcattattccaacgccagatcaactcgctgcgagcacaatcaacattagccagcctctccgcgttctcaggaatgcccgccgtaggaggggcgaggcatctccaatggaagctttcagtatcttaactcagatacaagagcagttagggcggacgaataatctagaccagctgcttaatacaactgcaggattggtcaaggaactgacaggcttccaccgagttttgatatatcagttcgatagcagctggaacggcatggttgttgccgagctagttgatcccaacactactattgatctctacaagggtcttcattttcctgcatccgatattcccgcgcaagcccgagaactatacaaaatcaacaaggtccggctcctatacgaccgcgaccaagtcacttctcgacttgtgtgtcggaccttggaggatctcgaattcccgttggacatgacgcacgcctatcttcgcgcgatgtccccaattcacgtgaaatatttggcacacatgaaagtccggtcttcaatgtcaataagcgtcaatgcgttcaacgatctttggggattgatctcctgccatagctacggaaatgccggtatgcgcgtgtcattcccaatacgcaaaatgtgccggctcctcggcgacaccgtgtctcgaaacatagagcggctttcatatgcctctcgccttcaggccagaaaactaatcaacactgtcccaaccgaggccaacccatcaggctacatcattgcatcctcggatgatcttctacaactatttgatgcagattacggtgttctgtcgattcgcgatgaaacaaaaattcttggtgacaacaataactcccaggaggtacttgcgttgctagagttccttcgcgtacggcatttggattcagtgcttgcctcacacgacatcgtcaaagattttcccgatttgtactacgctccagggttgaaggcaatatctggtctactatatgtcccgctctctactggaggtagtgacttcatcgcgttcttccgtcgtggacagttgacagaaatcaagtgggctggtaacccttacgaaattgaaaagcgaaagcaaaccgcgggatatctagaaccacgcgaaagtttcacagcatggcgggagacagttctatcgcaaagtagagagtggacagagacggacgtggagacggcggctgtcttgtgttgtaggttgtctccttgagatatcctaaatattttgcctcgattctttgaagactgacataccttgaacagtggtttacggtaaatttatcaaagtttggaggcagaaggaggccgccatgcaaacatcgcaacttactcgcctacttttggccaactctgcacacgaagttcggacccctttgaatgctatcgttaactatctagagattgctcttgagggtgctctggatgatgaaaccagagagagtttgaccaaatcccattcggcttccaaatcattaatttacgtgatcaacgatctccttgacttgacaaataccgaaaaaggccaggacctcatcaaagatgagaccttcgatctggaatcgacctttagagaggcggctgatatgctgtctggcgacgccaagcggaagaatatttcatacactgtttcagtacatcctggtattcctgagttagttctcggtgaccagcgtcgtgtgcggcaagtcctttcgaatgtgatctcaaatgccatccaacacaccaaatctggcgctgtcacgacagaaatttggcgctccaacggtcaaaccattccaggccatgtgggagtggagatgacggttgttgacacgggtgtgggcatgtcgcacgacaagttgcagaggctctttcacgaactcgaacaagtgtcgaccgatgatacctactaccccgaagaagaagaagagaacacgcagaacctaccgcaaaaacgtgtgttgggtcttggtcttgctcttgcagcaaggatcgtccataacatgcatggtcagctcggtgtcagatcagaagaagggaagggcagtcgtttcaagattatattgcacttccgattgccagagggaacaaccgtggacgaagatgcagatggaatgtcccctggtgttgccattcctgcgacgcctatgctttcagacaaggagtttacactggtttccggagcacatgaatctcgtgatgccagacgacgaagttctgaaagccttcgtagtggtgccagttcccgtagtggacacagtgggcgcagtgcgagaagtcacgccgatcgactcatcagtgccatgcaagagcctcctcttaaaaggtctactagccaagatttggatctgagacggctgaacctttcgtcgagtcctgccagcgccagcagcaataatgctcatcctcctcttgcatcaccatccgctgtaaagcgatcattgactatgcaggatccgcattcaagtctgtcttcggtcacgcataccccgccgctcatgttacagccgcttgtcagcccccctcccccaggtctggaaaatatcacggactcgggagtgccgatgggtgctctgcgaatgtcacaacattttgctagtctcggatcaccacccatcgagcccactaaagaagataactcatacttccccagagtttcatcaatcgcagaaacatcacaagctccctcctctgggccagcatcatctgccccaccaaccaccgtaccttcaacaacagactccgatcccctcagtgtccttgtcgccgaggacgatccaatcaatagcaagatcatacagaagcggttgaccaaactgggccacaccgttgagttgaccaacaatggtgaagcctgcacgattgcttttgcctcagctaccaaatattttgacgtggtgttgatggatattcaggtatattgaaaacacttctcctatctatcttcttcacggtcactaacccttcccagatgccaatacttgatggaatgagagccaccagagcgcttcgcgagtttgaatccaagacacccaaggaagcgctctccgaaaaagctatacacaatgatcgagtacctatatttgctgtgtccgcgtcattagttgaaaaggaccgcgataactatatcgatattggctttgatggctgggtcatgaaacctatcaattttgctcgtttgaatattctattgagcggtatctgcgattcatccgcccgaaaagcagccacatacacgcctgatggggaatgggaaaacggtggttggttcgacaccaagtaacgaacatttggtcgttgaacggccgtccttaaattctgcctccattctcacctttcctatcatctcttgattacccttgacccctgctcattcccaaggataggtccacacgcaaagctcagtccctctttgtccccagtctatcgtggttcgagctttttgttccgcgggcatattccttggaggtttgtgccccatttgatgatttccttctatctacatgacatttgtttatttgcttatgccggccgcggtacatgaaatgggcctgtgggattttacctggcgttccttgtgacttctatatgtaaaatatacggataccctatacgtcacatgtttgtgtttattttcatgttcttgtcatttttcactttattttcgcttttctttctatttactgttcatctcaatgtcgggatgtcatgacaactagttgtatggtcgagctacgttgaggtttccttggcgatgtaaaacgctgtcgccaagcgcaatatctgatgccagcatacagagacccactggccagaggggactagcacagatatacaacatttcgtccccagtctcaaccctatctgttccagcggtgctttcagcgcgggatgagtggtgctggtcgcataggccaagcttttcaagacgagccagcccctttgagagttgcgtttcattcattggttaatgcttgtatatgatgcaagtggtaggtgtttcctcccgtatttagaagtcgagttctcgagagctccctccgcagtctcctggagttttaagactgaccggcgagttgatggcagcgattttgatatcttgttcaaatgtgctgggacaccgcgcaacctccccaaggcctaagcccaccgtcaccataccatctagccgtttgtcatgcgagactgcttgaccacggaaatgtgctgccgtgatggagccaacttgcacatagtgtctagacgtcgcgtttctgttttctgtacaagttttacgtcgcagtatcctgtcagcatgtcggcaatagtccaagatcgattgggacataatccatatgcttgatggtgcacgtaggggtaagtaagctaccctggtgagtatttttaaccagtcagagtgtggatcttgatctgagatatagggaattaattagacccagtaagtacggagtaaattctaccttatttgcttcatttgcttcaccagtcttggaaataaatagcaaaaagaaagcaatgaccgcgacttgaacgcgggacttcgagatttgcacttaggatgatgttagtattgaggcgattagtcgctttggaagcgaagatacatacatctcacactctaccactgagttaccactgcagatgacgatggagcgcaagtataatacgctatactaggcttaccctttagatgaagctgatatactaattcccatcggatatattcattgacgacacgtaattcttacacaaggcccggggatagaggacacggcaagacttgcggaattactacgagatgctgggatcccatcggctctctggggggactttgtccgttggtatgtcgttcacagcccttagtattgatttaccgacgcatacgatattggccgtcagcttctatctgacaaatctgccccttgtctagacgacactgaaaaatagtgtgggctggctctctgtgatcgacgtcccgaggtcgcctacgtatctgcacgcctatatatgagctcccaaagactggggattcattcaacgactcgtttcatctatttatcattggatacaccgtagaccgagtgaattcagactctgcgtatcttcaattctgatttggttgattataaagcacatgaggcagactagactggaattacgtattcactttggtgcgattgagagtgcagatatatagacataaatagacgttgcagcccggctcagtataaggttacatggacaggatcctgctcatacccgcgtatcaactcgtgctatccacatcgtatcctttagctcacccgcactataagcctgactcatagcaatcagtccttccgagttagtatactcgtctcttttataaaatcgtcctatagtatgtaaatagaacagcttactcatcatataggtgccatggtctagtggtatgacgacacattgtggtacagcaatgatctgtgttagccccggttcgattccgggtggcgccattcttattttttttcttcccttttctctctcacttttaccaaatagtagaccagtcaaaaccgattttctgctgtagtgtaataatctaagagaaggaaaagccataaacctaagaatatatcagctttacttgatgtagccaaaatttgtcgccatttcatctttccggtgccatggtctagtggtatgacgacacattgtggtacagcaatgatctgtgttagccccggttcgattccgggtggcgccattcttattttttttcttcccttttctctctcacttttaccaaatagtagaccagtcaaaaccgattttctgctgtagtgtaataatctaagagaaggaaaagccataaacctaagaatatatcagctttacttgatgtagccaaaatttgtcgccatttcatctttccggtgccatggtctagtggtatgacgacacattgtggtacagcaatgatctgtgttagccccggttcgattccgggtggcgccattcttattttttttcttcccttttctctctcacttttaccaaatagtagaccagtcaaaaccgattttctgctgtagtgtaataatctaagagaaggaaaagccataaacctaagaatatatcagctttacttgatgtagccaaaatttgtcgccatttcatctttccggtgccatggtctagtggtatgacgacacattgtggtacagcaatgatctgtgttagccccggttcgattccgggtggcgccattcttattttttttcttcccttttctctctcacttttaccaaatagtagaccagtcaaaaccgattttctgctgtagtgtaataatctaagagaaggaaaagccataaacctaagaatatatcagctttacttgatgtagccaaaatttgtcgccatttcatctttccggtgccatggtctagtggtatgacgacacattgtggtacagcaatgatctgtgttagccccggttcgattccgggtggcgccattcttattttttttcttcccttttctctctcacttttaccaaatagtagaccagtcaaaaccgattttctgctgtagtgtaataatctaagagaaggaaaagccataaacctaagaatatatcagctttacttgatgtagccaaaatttgtcgccatttcatctttccggtgccatggtctagtggtatgacgacacattgtggtacagcaatgatctgtgttagccccggttcgattccgggtggcgccattctttttttttattcttttccccatgatcatagaagacagaccagggccgagtaattattaggtaaggcttcttttttgtaagcttttccaggtcgaaagtcatatattaaccagacatcatcacatcgttcactgatgattccatgcaatatacaatgttgtatagagaaatgagggggaaaggagtacggattttgatggggtatggcgggcagaactacccgtaggcggtaggagacaataagccaataagacagcccaaaacagcccgaaggcggtctgaacaccataatctttaacaaagtcctgcaaacaaattcatccatgagtgacatgaggtgatactctgtgctagtgtggaggttagaaaaaaaaattggcgccacccggaatcgaactggggctaacacagatcattgctgtaccacaatgtgtcgtcataccactagaccatggcaccggaaagatgaaatggcgacaaattttggctacatcaagtaaagctgatatattcttaggtttatggcttttccttctcttagattattacactacagcagaaaatcggttttgactggtctactatttggtaaaagtgagagagaaaagggaagaaaaaaaataagaatggcgccacccggaatcgaaccggggctaacacagatcattgctgtaccacaatgtgtcgtcataccactagaccatggcaccaagaggctgaaatttgcacaaaaattggctatatcaagaagcgcatttcatctagtttagcggcagcgaactgataggccttggctttcataagggcctcatttgcgagcccaaaggtaggatcgcgtttcattaacatggtgctgtatctgacattagcaaggcgtattgtctgcgcccgccagtggtgagcaagctgtggctccgcgaaaagaaaaaagaaaaaaacgccgtgttagctttgaagcttcataaaaagatcacatattcaaggagtaggtcacctttcagaaacttcttgtgcatagtatgtaggtgagtgccgaaaggggccttcgctgttcaggaattcacaatcggcatccaaatactagaaagggtttgaccagaatagtctcatgcaatctttgataatgatcatcgatgcaaagacacgcagaatgttgtaccgtatgttaggcgggggctgtgagaccgttctgtcgaagtcatcttgaacaacccaaccttttaagctctcaatgacatctttttttgctcttgagataagctttcacacctgcttcttctggttttgttgcaatagtatgctgcccaagattcacactgtaacgtttgatggttgagttcaagttcccattgggccaaggggagttcgggccagcattcgtaacatccgttcaggaactgtcgatcatttcggagagaacggatattagtccagcagatttcaagcgcatccttcagctcaatacatttttgttgctcttcaaatgttagagccggtttgacagagtcttcctcatcttccacccaccaaggaatctctccattctcccttttgatcattttgatcattttaatcatttttccttcttcttcttcttcttcttcttgtatgcgattccacccctaacatccatctgctgaggtttaggtcagaattcctagtcgggctttggaataaagatctcacagtcttgatgggggatttcaccaccggcttggcaacttccttcagaactcttttgtcggctttactagacatggttgaggggatttcgaaatttctggagatatggtaagaaagaagcaactgccatggaagcgtagaagctatctaaaaccgtggtgagatcaagacggtttggtttctttcaaactcgtaatgattttaaatgatacagggctgatcccggagatacttttctttgtttaaaaggggcgctggatacgccactgcaaggatatctgtttcttcccgtctgttatttgcaaaccagctcttcgctttgttcccaaatggattttcttctttcttcttttatttccggtcatagacgagatatttgagaagcactagagggtcaagagtccctttgaaagaaagcagaagtgaacaaatgggaaagtgtcatatgtcatctcggcccaatttccaacagaactactacggctccggttggtggttggattattatctatatgcctggcccaagtagatgatataatctttctgtgatttcttgaaaacatggggcgcatagatcgacgatggtagaagtcacctctttttggaattgccagataaacacatagaaagtaggtattaaaccatctagaatatcaaagaaacaaagggtttctgcggccatcatcttagaaacaggttaggtttggctcaacgaacttgtcttggaatctgatagatgaggtgggttgaaacaagcctaggtttcgcttctcacaaaatggttgattcataggtcacgacttaaatggagaattccagaaggtcactcgggtgaatccttgttgccgtattctgtcaatattctcaacatcagtgccttcggtttagatatgaaattaccaacttaatttgtagccctaccatgacagcttcctagccttaatttactctatcgacccttatagattgctctagtctttgctctaatctcctagtcatctgcatcgcggaagctaatgatctatgtcgaaggttatacatagaaaagtcttcacaatgctttttctgccgtctacctcaaaaaaaagcagtatctaaaaaagatctacatctgaaaataccacatagacagaggccgtattcaaacgagtaaatgggtactcaaatgtcattgtggggtaatttaggtataaaaacgccttccctacatcaatttcctaattagggcacgccacttgatataaatctgctggttaatcaaaatgtaacataggaccctgaaagacggcagtacggtaaaaaaagaagaattggagattggatgctgtggggtgatgacgacatataaaaaacgcactagtctggcgtgacgatcccaattaatataagtagataggaagtaccgaggctgtaatccggcaagccagtaaaagtacgccagcccgcacgagagtcactcgggtggctttgggtctttcggggtcttgaaacacgggaagctgaggaagtcactgtaaccctacgatgtatgtatacctacgatctacataaaggattccagagttggcggcattttgcgagctgatcggaaataaacagtacagcactagacaagatgaaatatataaatcatcaacatctgctgctcaaatgcataacctccccaaacccactggatcataattccacaagttcaactcccaaacgccagcatgtcgttcaagctcctgcttgccaccctcccagccctggcatttgctgcctgcaccggtcctgctgtcaacaccaacggccttgatctaatcaagagctttgaatccttccaagcaaacgtgtacgatgatggctacggcaatcccaccatcggctacggccatctctgcagcgactccacttgctcggaagtgacattctccaagccattgaccgaggatacagcgagccaattgcttgccaaagacctagtggtaagtctctacaagcactcttcctccctaaaaccccactatgtaggtatctaatgaatgtactaacccggaaaatagacctaccaaaatggcgtaacaaacgcccttgccaccgcggttactctgaacgacaaccagtacgcggcgctcgtttcgtggacgttcaacgtcggcgtcgggaacatgcagtcatccagtctagtcagccgcatgaatgccggtgagaatgtggagactgtggcatctgaggaattgcccaagtggaataaagccaatggggcggttgttgctgggctgacgcgccggcgggctgatgaagtgaagctgttcgaggaggcttctcagaccaaggctttgcctgttggctgttaagtcaggacttgaataggtagactttggctatcttttatcattggaggtagggggcgatgcattcattgttgattaatgaatgcatacatctactttcaatgaagttcgatgtttatcttcggcagctttgtttgttccttcatacttcttccggggttccaaggctgttttctcaagacatttggatctaagatgaagacacaataaaaggggagttgcgtttatattttatatggatatcttcatataacatcagttttcaagtaatttcatataacagtttcctggtctagcggttatgattttccgttaacaaatgccattagctgatgttccggaaaggttctgggttcgattcccagggaaactattttttatttttatttttagataccatgttgctaagtttaggggtgatatacggccgatttgggtctagtggcactctgaactataaagcgatccttccaaggttccaatgaggctgagcttttttccgtcctcaactcacctctgaaccatcgcaacatcctaagtcgacccatcatgtcgctacttcgaaagccgataaagcaatacccttggcttgcatggtccatgtgtaacatctatgactggctccattactctgagcccacctgggactatacaatctaccggacgacctacactccccaatctaatgccgctttcctgcgtatggtcgacctcaccacgaagtacatgaagaacggattctacggggaatacgaatcttcccttcgcgaaagatccaatgcaaatgagttcaacatcactccctaggatgaaatgtggcctaattaccagccacaggtcattgaagatacttcccagttcgatggagcatcgatcgaccagctccgcgagcatttcagggccgacgcaattaagcgtggtatactcgatgtatttcctgggtatcgtatgtttattatcattgacgaagaaagttttcacacgttacaaaacgctccccttccggagaagtcgaaatacgaagaggagagacgtcattatgtgaaactcaccgaggcgttggaggtagatctatatgaggattttccagggtggatgaagtgttccctgtcctcgttattcgaggtatggtcggatatgcaggacacggcttatatgaaggacagttattcgatgagacccgacggtactgatgttttgtgaatttttcatgtcatgtgggacttgaatactgcagtcactatacccaagattcaatagctgcatattgtcggctctgcgaccgagattgtttattgcattgaaccggtagattagatagcctgtgtactcccgaagttacatgctcctcggggtcgtcctcgtcgacgtgcacgaagggggtcctgtactagaagggaggggtcaattagtggagcgtcattaatactatataagtgctaatgctaatggaaaaggtctggttcaagtgacttattcttatcgttatactcctcaataatgtgaatatatggaaatccagaagtattcttcgagttatagtcacagatagggtgaattagtggcttatctttcccttctggtagatatcttgtgtaaacctcctttataagttagattgtatgtactgagacccgatttacaagaaggcggtaaagtggtggaacttacttctttagcctttaaaccttcggtatattaatcctatactttagctttatgtcacgattggcacttgcgggactcatactttcccgttcgggattgtaccgttggtcgttccttcctgttcgagggaactcgtttgcgcagacagtcgtaccttccttctgggataaacgaggatagggctttgcccccgaagggttataaagaccccattgttgtttaacgtttgttttcttttctttccttctacatacttgatattcgatgagcaatgcacttcttttgttagaaagaacctggcacgtcacagggcttggccaattgtattcagatgcatggtacccaaccccaactccaagtatgaaaagataataaggggatatatccacatcaggaatggatggaataagtcaatgaatgtctagaccgaaagatctgcgtaagggagccaacttcatctacagtcaatttgtgcggcggtgtttatttgtcagtgagaatctacttcataccccatatgacgtgacatattccaacgtatgaacctatagccattgccgttaaggccaacgcatcaagagtgtcgagtgaataccaagccctcaaatgtttcagcgggaatatcaaactccttccgttctaagtccgactaagtgcctgcgcgtggcaccccagaagacctccacttgccaagaataaaacctggttagtctggacgtgtagcttcttctgcgagttacattaactagcgagaaaatcggtgtcggcataggaattactcgattcggaacctatacggggtttgatatggagttgagccttgccctcacaacgactctacatgtatatcttccaatggacaggggttaatgctcagcatttactattgtcgaataaacagagattatcaattagtttagtcctacgattcctattaatagagtataatgggacagaagtgacttaattttgttaggagtttacatacgaattgtaggtaccaattgtcttcctattattatgaggttcgagactaaggcggtgtggagggcggtaagccgaatcccaaaaaatcaggcaggggggtgtcggattatccaaggggggtgtcccgttaacaatcccctaagtttatacctatattctactttgattttgtattcttggttttggttttggttttggttttgttaggtcgtaaaattcatacaagtgaccgagatatatattgtcaacatgtatgtgatctggtcattattttttcagtcttgactcttgaagctgtcattagagtcattagattggccagttaatgcattgacatcccttcaccatgctatatactcctccatctttgggggtctcgccagcgagaaccacccaatcttcccccattcaccaccacctccgcaaccattctcccacgcgcccccagaacgtgggcatatcttcctccaccctgagtaccccacgcagtggggacttcactcgtgggtatgggcggccgcggccacgacgacggcgagacttgcccgaggcactgccaaacttatgcttggcaatttggcggttgcacacggcaagctgctcgttcagctcccgttgcatttgctgcaagccgtggtaggtcaccagcagcttgtggaggtcatcgagcgctggcttgcgcttcttcctcgcctggatgggaaatgttagtttcatagaatatcgactggttcaagggaaggtcagggctcacccgcgaggaatcatgctcagctgagcgctttctcttccttatgctcgaaggctgtcttgagtcagattgtgcacgtaggtcagtggacattgggttgagactcaccaataagggctgctcgtactcactcccgctggtatccatgttgtcttgtgtgggggatacgaagagagaggtgaacatgaagagaggatacagcaatcttgtatgattttataccatgagattataggcactgcgtatttgaatagccattgtccttattgtgcaggaagatgacatagggtatcaataagggcacaacaaaaccatctctgattcaccagaaggacaatgagaattcaatagatgataataaatgataacaatctcattggagagggagattgttgcctgatatcaaattaactaaatagaaaaataaagaacaagtgatgaaaaagtgagagattcaccaaataaatcatgaatagtatagtcgagggtagcacatgagacgaaggtaatatcatgctgcttgcgcttccaagcaggtctggatattgaaagtgttcgaaacccttcgtaagagaaaggcagagagagtgtttgacgcatttcgagctctccgatcctaagctgccacaaaagaacacgatttgccatcttcacaccctctactccatgggatcttgtttactcacacctacgtcgattccatagcagccagtcgccccgagcttcttaatcagcaggcttggaatatagccaggattcttcgcatggtacatcgtctctgctattgttgtacggcgagttcagttttgcggatattcggggtttttcgaccgttgcgatgtttcactacggccataaagctccaacacaaggcgagaagaatccaccatatttctactatcagatatacacggtttttggcatcttggcaaagtcctgtgaatcgtgtattattgttgatcatgtctaaaatgatatcgctcaatgacgctcccgtataagttgtaagtctatgaaatgcagagtaaatcccaaacgctaaattttcgctgataaccccgagaagaaaaaaaagaaaaaggcagaatcatgacacatatagaacaggaaaatggtgaaaaatgcaaataactaactagaagctgaacagaccggtgcgctttttgccgtaggggtagacaaccaaagccgcgataaacagcccgactgtgataccgatcgcgacttggatcatgccgaaaccaagactggcaactgaagtttcagagagagagctggaatatgaactagtcccattattttcaaggttctgacgaacctcgtcggcgtatttgatgcccgcaatcagagagccactagaagcaaggccagaggggaccagcacaaatataccaggaagaatggcggtggcggcatggccatgccagagccgactgtacagattgcctagcacaccaatagtgaatgcaccgacggtgttggcgacttccgattgggcgccgagtttggtcgtgctgaaatagttggcgacgtacccggacaaagcgatgaaaaccatgacgggcatctgctttaattttccatggttcacaatggctaggaaaatagcgtagacagccacgaaggggaatgtgcgtgcataaaccgacccatagacatccaggcctgaacacgtagatgcagatgtcgcattgccatccattagcccgtagatcgtagtccccactgtaataccgtagcccaaaaagagggagtagataatggaatacaccatacggatcgaaccagcgatgatctggtgagattgcagctccagactgctacaaaggaccatgaatccagggagaatcagagcgatagatgactgtgccatagcggagaagcagaaaagtggttcggatttaccattgcgggtaaccatgatgctgccaaatgcgcgggcgaggaaggaagtcagaatagcagcagtaacctcaaagacgttggagtagagagttgaccgtggggcgagaacgtgctgcatcagtccaacaatgcaaccgagacagaagatgatgggcatatcgatcggtcgcgctttgaaagcgaacgggccgaccgctgcactagcaaaaccgtaaaccaggaccaagatccatttactgaatctgggcttgcgctgcataatctcgtctagttcctgagttgcctcttcgacgccgataagatcgtgaacgacattcttgtaaacgttgtgtgtatcagcaaggcgaccaaggtcgactccttgcaccatccgtacaagcttgacttcggccgtgcgtgtagtaggatcatcaaaggacatgatcatgcaaccgggcagatataagaattggcccgaaacttccaggaccctggcggtcatctgcatatactcctccagacgatgggtcggcgcaccgtatcgcataagcgcacggcacagctgcatgatataccgctgacgtgcgatgatttctgcgatatggacggtaacacggatctcatcttctagacgggtcttgcgcttgctcttcccccttttcttttgcataccgggagcggcctcaaccgcggcaggcaggctcgccgtgctgaggttcatggaggcattgaccaacgacgaggtggaccgatgggctgacttcttgtaccatttgagcttttccttgcgtggggtggcggcaccagaggccggctgagacgcagggataaggggcgagatgtaacccttcttcggggtggagatactggaagacacctgagtgtcactgtcggagtcatcggtgatgacactttccgggcgcgaagagctcccgctctgggcgacctgaagcttgagcaactgcgacagaatgccgccgccgactccactagaccgtctccgctgcgtaaaggcgctgatcaagccctcgggagttgtctgtcccgaccgctgatatgcgccccgaggtttgcgcttccgtagctgatcctgaaccgcggtcatgctgcgcaccaagcgatgagcctcggcgctagggggcggctcgataaaattctcaccactctccaatgcgtgcgctcggtcggcctcatggcgggcgcggcgggcctgcagctcctcgagtggaataccgctgtcgaagtcgtctgggttgtaagaggcattgagcggctcgccctcatccgtggggcgaccgaggcgttccgtcaagcggctagttttctgtcgcaacagatgaccggtcgctctgaaccggtcgcgggccgaggtcgcccggtccattttacctgtgaaatcatgtttctcggtttcatcaaactcgggcatatgcacattggagccgcgccgggaatgggccggggctggcggtgtgatggttccggatagcgggatttcgttgagatctgactgcggcagtaacggtcgtgacaggggatcggagtcattttcgtttcggcgaagactcatcgagcgaaagcgaaccctatgatgggatcggctcccacggcgtgtgggtggctcgatcccggcattgtattggttgacatcgacggtggcttcacgctcgaggctatgacgatcaccgggattgtcaatgattgggagagggtattctgcgtattcttcacttgggcttgggtgtgggttgatgatgcccgacatgaagggggatttgggtgagctcggtggctcggtgaaagattatccgagagctgcaagtcgtttatgcaaggcacaaggcacaacgaatgggagaaagcaagttaaaagaataatatatgaaaagatgaacggtgaccaggagagtaggattaagaagaaagaagagttttttttccttttgataaggctagaacaggatcaaatggcgaaaccaaggaattgccaatctaagaattccctcaatgcggatttcagttcgggtcttggatagttaaaatagttaaaaaagacttcaaaccagggagtctagatcttctagataatgaaatcataataatacatagacttatatgcacatcttctaccatggcctttataggctcaaccctaagtccacccgctgtttaaccctccaactgcacatccatggatatatgcacactggcatgtcccctctctcattcggcaattctagaattggaactccgtagagtacgtacaacctgcgcatcagctaggtggtgtgggtcatattgtggcgatcttgttgtgtccagtggtattgacaccgagccatccgggctaaagtgtttatgtatggttcgtgcatgttcttatatatactttatataaatgctttgtgaatgggttccttgccctttccttctgttttcgtccttatctttggcacacacctagagacttcaccccttaggccgcatttgatctgcctaaaacgtcgatcttgacccacgtcttgggtgtagtctgctacttcgcagccacctcctgagatagagtggagtgaaaaggatccaagtcccttgcaaatctgatgccattatcccctgtgatatgaatcaaaggaaagggttaatcagacagtttgaagtcagatttatagatagaaacatgacccactggaccctcgggattcacgcagaacattacgaatcgccgatagctcacggcccacgccacccggtggagtcaaaatggatggcgcaaatctgtgcggttacacatgattcaatggtttaatctagtgatcgagaccctctaccccctctatcccctctatcccctctatcccacatgctatcttgtacaacacacgcagtagctcttccaagtccccttatctcagctctgaccgctccctgttggaaaaggcccgttcttagatcttggaaataccgctgttgaggtatgctgcgcatggaagccacgctgcccaagggacgaggcaccagaatgtggtccgggctgctgtccacaattgaccagacccggcttcaataaaataaaagcaaggcagttaatgctcgatttgcatacgcagtacttggcatcccggtcaaagaaagattgcgaatcggtcgcatggtaaaagacgtatcccatcaacccatattcataaatgagagtctaggcgcaaagagccagcctagtggaaaatatcttgaagctggttatgtctcatagctttacttgcctatattccctataaagaatcacaagttgtctactccgtacaggtgttcataatcgtaaaacaatcatgaaagcccaggccaaggctatgtggcggatcctctggtgataggggttaccatgccaatgataaacacggttagcctgagcaagagcgacagaatagggcccggtgaaaatactatataaaatatagaaaaaaaaaaaatctcaattctggatgaagtcgtggagatgacctggagattccaatcgtcactggaagaagtggcaaacccccactatgcaaactaaacaaacaccaactagatgactaagcaagggcaagccctcatttagttagcatgtgacagcatgtaacatccattctttactccaccgatacaatttcgaagatgctcggtattgcaagaagcttgtttgcaagcaactgcctgttggtgagtgcggttggtaattatgactttaaaacatcggaagatgtcttcttcctgttcgagtctcgtgaagagggccaggtcaatgtctcggacgaggagaaactggtagctggatggacgaggggcgcaaagctgtaggcctgccttcagctcccccggagagggcccgggtcaggatagtagcattatgaggaacaacaaagccatcgacatagagtgataattcggagagttgcccgttatattgggaaatgtcattcgaagcttccaagtttctggcgtggatgtgctgtttgaactataaaagctcccgggggatgtgcgcgagttgtctagatggcgtcttcaattaatcattaggctataataggataaaaaatgatatagacggcgaattttctgatagcagccaaaaccaataggacctgcgttggcccacacgtttagcaatttagaaatatcggtgaacattaaccgtcggggcttttatttgagaattgtcaattagattgggtacaacaccgagtagacaatgtggagtatactgacacattcagatcgatacgtgtctgtttcacagacagctgcgccgagttcagcccgaagttgatctgtttcgcggcgagtttcagggcccctggtcgctcgtgcatattgatgaaatgaagccgaatgagttgaatcgcttttccgccgtgggttgttcgccacaaagcaagatataaaatgtcgcaggcagacatgaccatcgccatgccaagtagcagtaattcttgatgataacggcgacttttgctctgcttaatctatccatcgctacccaacacgatgcccttacgattgttgtgtctccatggctgggggacgaatcagaaggtaagctaccaacgctgctgataggggaggggtgacggcaatcctaatttgccaatagattttacagtcacaactgagtatgcaatcgcctactacagtggcgaaacacagaactctaatcaaacaggtgcgctcatgcatgagctccaacgcgacaacaccgcgaccttctctttcctcgaaggtgacgtcgattcagatcccgggcctggaattgccggttactatgacggtccgtactacagctactaccgtttcccacgcaccttttcccacgaggacagcgatgagtccgacatcctggaggcatacgagcaactgagtgaaacagttgccttggaaggtccgtttgatggggttctaggcttctcccatggcggcacattggcggctgggttcatgatccaccacgccaagatgaatccaaatgagccggcgctatttcgatgcgcaatcttcatcaattctctcccaccgttccgtatggaacctgggaagcgtcctatcgtagacaagggactggaggggtttatctctatcccctgcgtgcatatcgctggagctaaagacccactctttgaatactcaatggccctgtatcgactctgtgctggaagggattcgacatttgccgtacatgggaagggccatgatgtccccagtgatcggaagaatgtcgccataatcgccactgcaattcgaaaactatcaagtcaaattttgtgacgtcggataccaaaggcatggtctttacttcggctgtgcgacacagaggtaaagtttgggcgaagaagagtttgtttgtagaagagagtagtatatttgcggttgtggaacataacctgttgttgtaatggtatattgcagattcttcgcgaaggcagacaatgtgtttcagatcaagacattcaggacccctgaattttgtttcgccgtggagggttgcacccggatacttacctcgttgcgactggggtgaaaccttcccacacatcccgatgtagattgtcaccgagaacgaatgacactaagaaatcgagtagatagattgctttgatacaggaagcccatttacctggcctgagtagtcccctctcgcttttccctggtatgagatatatgttattagccgacatccagcaaagcaaatgcaactatgtcgtcacaaaccagcgacaaaccctccaaagcgaccgttttgcaagatgacccggcaaacttggcaatagcaattgtgggaattggcttccggggaccaggggatgccaaaaatgtcgagaagctgtgggaaatgattctcacgggtagagaggcatggagcccaattccagctgagaggtggaacagtgcagcattctatcacccggatcatgcccgccatggaacggtaagttatgcatgagatgaatccgaatacttaataacgtgagagtagatcaatgtggaagggggtcactttttgaaagatgatgtatctgtcttcgacgcgccgtttttcaacatgacaagcgacgaggcagcggtaagtacagagttgaatgttgttgggctcatctaattatcaacctaccaggccatggatccacagcagagattgctcttggaggtagcatatgaaggtcttgaaaatggtaggttattgctccgaatgacgttttcgaggctgatgatggtggatagctggcattcccctgaccaaaattatgggcacaaaaacttcctgctttgtagggtctttctctgcagactatacagatctcttacttcgggatcccgagtgtgtgcccatgtatcagtgcacaaacgccggacaatcgcgtgcaatggcggcaaacagactgtcttatttctttgatttgaaagggccctgcgtcacggtagacacggcttgttctggaagccttgtggcacttcatttggcatgccaaagcctccagacaggggactcatcaatagcgattgcagcgggagtcaatttgatcttgagtcacgaatttatgtcaacgatgagcatgatgaagtatgcaagaaattacccgcaaccgggagactagactgatttagtcacaggtttctctcctcagatggaagatgccatacctttgatgaaaaggctagtggttacgcgcgaggcgaggcagctggctgtctcatcctcaaacccctggccaaggctctacacgatcacgacaagatccgggccgtgatacgaggcacaggttccaatcaggacgggcgtactgcaggaataacgctacctaacggggcagcccaagaaagcttgatcaggagtgtctatacaagggctgatctggatccctcggaaaccgattttgtggaggctcatgggacaggcacactggctggagacccaattgagaccggggcaatcgctcgtgtctttggaactggtcgtccgcctgataatcctgtgcgaattggctccatcaaaaccaacgtcgggcacttggaaggcgcaagcggagtagcgggtgtgatcaaggcagtgctaatgttggaaaaccgcatgttcttgccaaacaggaattttgagacaattaacccgcgtatcccactcgacgattggaaactcaaggtttggatgttcgggaaagctaaagattggagactaacgtcagtaggttcaattgcgccctgagccatgggcgactacgggccctcgtcgagtttcagtgaacagcttcgggtacgggggaagcaatgcccatgttattgtcgaagatgcccaaagctgcttatcgagctggggattcaaagaatatgacataatccaatctacagcgactaaatatcataacgagacacctcctagcctgccgcgtggtttatctcgcatattcatgctctctgggtttgatgaaagaacctgtgcacagcagatgcaggctctgagcaatcatattctcgataggggacatgaagttgaccatgaaaagtttctggacgaacttgccttcacaataaacgagcgacgatctgtctttccatggaaggcagccattgtcggagatacgatggcaggtttggcagcctcactttctcagaacatcaaggctaggagcgccgtacgacagccaacccttgggtttgtctttactggacaaggcgcgcagtgggctgggatgggaaaggagctgcttcaggcctatcctgtcttcaaaaggtcgatttcgggtattgacagatttctgaatgacattggagcccctttcacagtggaaggtacacagacaccagacttctaaaggtcccgtacactgacatcatgaatgcagaggagatcacaaagtgtccccaggactcccatttgaaccatccaagtctcagccaaacagtgtgcacagccatacaaattgcgctggtcgacttgctggaatcgtggaatatacatccagactccgtaacgggtcattccagtggggagatcgccgctgcatatgctactggagcactcataatggacgatgcaatgtcattggcatactaccgaggcgttgtggcaagccagcttctgcatgaccaaccgaacagaggtgccatgatggcagttgggatgtctgccgaagagatacagccctatctggacggattccagccccgacagctggtggtagcatgcatcaacagtccatcgagtgtgacgatatcaggtgatacacttgcaattgatgcactcgcccaaaccttaaaagaacagcaggtttttagtcgacgcctcgaagtaggtgtcgcgtatcattctcctcatatagaacaggttgccgagaagtattacagcttgatagaccatatccagccccgaggactggatcagatagcgggagacaagagaggaaggtcggggtcgttcttttcctcggtcactggaacgatgattcctttggaagaattggatgctcagtattgggtgtcaaacttggttggacaagtgaaatttgccaactcgctgaggtctttgtgttttgagacaaatagtcaacgtgctgggaatacagggggttcccgaatacgaaaggctggggcagcccgaaagccttcggtggattgtctgatcgagatcggtccccacgcggcactttctgggccgatcaagcaggtcctccaggcggatgcaaaactcaatgctgccgatataacctatattagcattctgacccggaaggccaacgcagttactacagccctcagagcagtcgccacactaggatcactcaactgccccattgaatttagtgcaatcaacaggcccatggggagaagcaagagtggcacgctacagttactggttgatcttccgacatatgcctggaatcacaccaggtcatattgggcagagccacgactgagcaagatgtatcgaaaccgaacctcgccgcggatggatttacttggtgcaccagacaacatggcatgtccattcgagcctcgctggagaaattatcttcggacttcggagctcccttggcttcttgatcacaggatacaggggaacattgttttccctgccgcagggtatttggtcatggcaattgaagcatcagcacagttgagcaaagacgaagaaaagtttgcgagatacgtgctgcgagatgtggcaatacaagcagccctggtgctcaacgaaacttctggcgtcgaggttatggtgtctcttcaaaagtcgacgcaagaccaagaacagttgtacaatttccatatatactccatctcggaggataacaggtggactgagcattgcactggactggtcgggacacagaaaagtattggcgtttcaggcgacggagtcgaggaaactgatggttatgcgacggtcccgttgggaactgaaattcatggaatatcagtgattgacgtccgtgatttctatgacaagcttcaaaattctggtctggaatatgggccatgttttgcgaatatcacaaaagcacgtgtcactcaagacggaacgtgccttgcagaagtcactgtgccagatacactatctgtgatgccagcatcatttcagcatgagcttttggtccatccttgcacgctggatagtatgttccacaccatttttgctgctctacctccaggtatggggcttgaggaaggacctgcaatccctgtttcaattgaagagatgattgtatcatccagtctcagctgcccggcaggagaacccatgagtatctgtacccatgtgcgcccgatgccaaacaaggacgtgacagcatgcatagtagcagtgaattataacgcgacgcaatttgaaaccgagccaaccatttcacttcgtggcctgcgatgtgcacggctcgagcgtcatgaacccgcgtcgcagacaaaggacaaccgtacaatctatcatattgactggaaacccaatccgagttttatttccagtaagaatgcctcgtttctatttggcagggaggatgctattcaagagccagtccttcgagccgagcatgatgagagtgcagctggcttcatccgagctgcgttaggggaagtcagcacaacggaggcaatgggacttgatccttctcatcgcacattccggtgttatctccaagacgtgcttgaacgaaatgataaaccctcaatatcgttatctcacttggaaaatatcaattccgcccctatgggaaggctcctgtcggtcattggccaaaaccttgcggctattattagacaccaagttgacttttccaccgtcatcaaggacgatcgccttttggacgagttctgggatctattctcagcggacgcctcgtatcaagcagctgcaaagtatgtcagtttgattggccacggaaagccagacatctccatccttgaacttggcgttggcacaggccagatagcggagatatttctacagcatcttgtgacgctcaacgagacagcctgttgcgggaaatatacatttgcccacgaaagcgcttccgtgctggagcatacctcgaagcggctggaggcgtggtcaaaatgggttgagtgcaagcccctggatcttggcaaggatttccccaaacaaggatttgaaaaaaattcatttgacgtcataatcctgcctcatggattgtgtactgctcgttgtgaacaatatgcactcaacaagatccgtgatcttttgagaccatctggctatttgattacaaccaatctcttcgacccaaagaagaatgtgctgaaaaatctcttgttcagtgccttgcactgcttatctgcagacgaattttgtttgggccagggtggttggacaacgagtcaatgggatgaaatcctgcaagatgcgcatttcaccgaggttgatgcctatggggaacaagactccgagaagagccatcagtttatcgttgccagaaagcgaaaagcccaaaagtcgcccagaaaggtttctattatttgcgaaaacgaaaccgaggctgccaggaatctagtcactgcgctcgagaatacttcatgtgaggtgaatgtgatacacatcgataatctggagtgtaaggatcatatttgtttggtcttggatacaccgaactcctcgctgctagcctctcccaatgaaactacattcagcaagataaaagtaatgttttcgcagagtggaggagtcctctgggtcacaaagggagggatgattgagcccgtcaacccaaccgcggctttggcggttgggtttgcaagaacagcgcgcgccgaatccggtgtcaaaccgattgtcacccttgacctggatgctcgaaatcctctctcggaatctcaagccgctgagatgatcgcaaaacttctggttgcccgatttcttcgtgaaacccctgatgaagacacggaatatgcggagagaaatgggcaagtcctgattccacgagtactagagaattcgaaggcgaacatggctatgaacggcattaatgacattgaggctgtattcgagcagcctttctatcaacttcaaaaaactctccgtctttctagaaattctaacaaccccggctttgttggtgattcgcagatgacagaactcccagtcggctacatcggaatcaaagttcaatccttcggtctgaataaatgggatattcagccagaccatcttgactgggaaacagacgacactctcggtctggagtgcagtggcatagtatacaaggtcggcgccgaggtccacggcatcactgtaggggaccgggttgcttgtcttggagctgggactgcgagaagcttttatcacgatcgggcatcagcttttcagcggatcaatgatgaaatgtcattacagctggcttcgtctttgcctctagcatataccgttgcttattatgttgtgaaccacctctcaatggttgagtcaaatgatgttgttcttgtccatgacgctggaagccacttcggccaagcacttctggaagtgtacctgcttagggatgctcgggtctttgcgacagtgaacggccccgacgaaaaggacttgctgagctcgaggttcgggatacctggggagcatgtcttcataagcgggaagggagatatagccaaggggatgttgcggtcaactgatggcaagaaagcgaatgtagtagtcacattccagagcgcagaggataaaatgctccagaattgcactgcgccatttggtcggtttattcaacttcgaacagacaacctcaagacccggctcttatcacaccctcgaaacatgtcgatgtccacaatcaatatatttgggcttcaaaaggagaggactgaccttgccaaccagatgtggtcgaaggtctctcgcttgttcctagaaggacgactcaaagggcctggctttactgatgtatatcatgtttcacatattcaagaggcaatgacggcaatcaagacccgacagcatgttgtggttcatgtggaacagagtgatcttgtgaaggtatagtttatcctaagcaccggaggacgtccatttgcctccagctaatgtgatttaggccacgctccctagggctactcagccattgttccactcagatgcgtcatatatgctcgttggtggacttggtggaattgggagggaggttgctctgtggatggcaaaaaacggagcgaagagtctcattttcgtcaatcgaagtggcctttcaaagtctcagtctcaggcaacagtgaagaatctggcggaagaaggtatccaggtaactactcgagcttgtgacatatccgacgagaccgaagtgcagcgaatgcttcaagatatctcttgtggcatgcctccaatacggggactgatccaggcagccatggtcctcaaggatgttcatattgaaaacatgatgttggacgagtatcgggatgtcatgggcccgaagtattatggcacttggaatttgcaccgacatctccctaccgatcttgacttcttcttgatgttatcgtctataagcggcgttataggaaatgccacacaggctgcctatgcggccggcagcactttcatggatgcattcgccgcttatcgaagaaatttaggtcttccaacagtatctttggatctcggaacgattacagatgttggccatttggctgaaaacagagatttagcggcaaagatggaacggcaaggattccagggaactgatacaccaactcttttatccctgatacaagttgcaatttctcagtcaactagcggagcagcacaactcgtaacgggcctcggccgatggaaagaaatggaatcacttgggaactttgatgtgcccctgtttgcccatttccggtacaagttccagggccatgacaaatctactgcgcttgacgactcgatggaaggattaaaggttgaacttgcggccgcaaaaacggtggatcaagctaccgttataatctccgacgctctcagcaggaaaattgcctcgcatctctctatccccattgaaaatatcaattcttccaatccggtctccgagtatggaattgactcccacgtggccgtggagctgcgcaactgggtatcaaggtccatggactgcactgtccccattttggagattctagcaaggtctatgttggagttgtctcataaaattgccagccaaagattcgagggcaagtcggagtgagtaggaaacctttttggtgatcgggaaatagaaatatctatatctagcttctcatccatggagatatattagcgtcgattaatcctcccgtgactttgtaaggagggaaatttggacctgagggatataatggattaaagcggcttagagtcagtctatttgacatcgaagagatcattcttgtcatagtaacctcaggtattgtccaatattcgctctaccgtgcacaccctatgttcactcccacttcagcgcatcctgtccgtcgactgcggctcgcacccttgctcaaagggagcacagtgggcccggaactcacctctactgagaaccaccgtccttcttcttctgtcacgctgacttggcggtaattcctcctcacgctttagtactatctgcctagtagatgggattatgaagtaatctcttgtattgcagagtagtaataaacaagaaacaggaaagaaacaatgtaaccaagagagagatgttacagtttggttgcacgagcccaaaacagttgcatctgcccactatgagagccgggaactggcgatagtcgatccgccagcacaaactgtgactctccacagcccgcttgttcgaagagggagaatatctgcctctgtgaaaatccatcgtgcgagatagtatgcgctgcaggatttttcggatctactagctcatgcatgtggtgatggtggtggttctccgaagaggacggagttgtctgtactccagcttgctcctcagtctcgttcgacacatcgcgcgtcgcccagtcaatgattagaagtacaccacccggtcgcagtctttcggcgagacgtttggtggccaaagcgatgtcttcgacatggtgcaatgccagacaaatagcgaccagatcgaaaccattcagctcctcctcgctgagtggaggcctagtcggtgtgattgtgggagccaggagattaccctgaacggcgaacatgcgcgactcgtcgaggcctagttctgttgcggttgcacggtaattttccagcatgccatctgacaggtcgacgccaatacatctggaaaaatgatggtatagggactagcagaacagcaactgtcagtattgcctgctgcaggtgctaaactaaggtcagtgactcacgcgagaaataatgccatttccgcaggcataatccatcaattttgtctgccgactatctgtggaagactgaacgcctatccagtccacgttgtccgtcaggaagtcgaaaatctgcgtctgtagatcttgaatccatttgtctttgaacacatgctgagaggcatggctagacacggtcagcagtcagaattatttctcccaaggtcctctccgtgcgtcttttcatgggaaatctctctatcgctttacgactcacttccaatattcttgattcttgctggctagtgtctctcccattgtgctaggtatggtcaaggtctcttgtatgaatatggtccgatatcgaagaaggaaggcgaatatggccacgactgcagctgcgcgatatctccaggtgaacattggtgaaaaggtaatgtggcactacaaggtatttatatgacccaactaacatgtgatcagatatttgatgattgaaccttccaaggtcccggggaaaaccatcgcttacaaaacatagaggaggccaggtctgtgttggaggtgtaggtcgtggacaccgattggcttatcccaacagatcaaagcatcaagcccacccggagaatatctcacggctaatcattcagctttcctccagggtccccagccatgatttgttgatggggtggagtatcttcggagtccgtcagagtctgcgactggaccgtatgtagctgaggtcattgtaataatcatgttgtctaagtatcgattactacctcaaagctaccatgagcatcagcatccttatcatcggtagaggataagccgagctgccagtcgacaccagtctcgtgcgccaactgcatcgagccatcattttcactcccggggtttatcgcaaattcctcgcaagacgcatgcacaatgtcgcctcgtgggatcacaagtcgcttgaatttcattgaggccgctagagagcgttgctatcgcggtatgacaggatccaatttgagaatgtcgacataagaaggtctaacggaccaccgaagggatgttttatgccgttgcctcgcgaaagcaggtatggacggggaagaaattagtattcgataagtccgcgatatttcccagatattacgggatagggggagtgctagcacggggagtgtaaggatcatctcatttcctttccttttcctttcatttagttttgttgtttgcatggcacggcagttttcactgtcccttattagcgttgaagaacgaggctgtggattcgctgatcgttggggttgattccaacatcatgccggcgatgtacgttgaggtcaaggcacttggctattcttgcgtacgggataaacaatgcttcaagttctccttcctgcatttcctggtcatcttctcacctcaccgagagcccgtgaagaaggatttccccctactgttacgctgatggctcaggggaaggaatagatgtattatgctatgggtcacgtgggcggtatgtccagaggggtaacacctcctccgtactgtgtaggttatcgacaacgaacacaggaaatttgagtgctaaaataattgacagacgaatattggctatttggggaacgtgatccacagtggtcaacggtgaacactttgggggttgtaataaggggatatactattaggcttcatgatcccccgatgctccaaagtccctttctatcatggatcgtctctccagcaaatctcaaacggcctctcccgagtacaagcccagataatgattatggctcagcatgtttcatgttgccatttcaaatcaaaagtcggtcagagatcaaaagttgtaagtgcatgcattaagttggtggagagacggggtaactaactatccaggctatcgagataccgtcggcatacgtcgacatagccccataccatattcttacgacatctccgtcccatccaatgaacatcatcctcggtcttcggcttttgaccacatttaattcctttaccacgcgtacggagaccgcgtcgtgccaagactccaatcggaggcacgggtgagcgaagatgccgattagtcagcggcttcggtccaaaaagcgcctccgatccattttaagttatcaattgatgactctttacggagtacaggcgctctagagcgaaatgtttgttatcacttggggctccgcacagaagtttcgacgctgcgaataaaaagcaatgtttgcttcggcctcggactttcggggctgtcttggacccctgagactctaataaaatgatggagtccccccaagtatctccatggtctgatcagcctctttcaacgcctctccccctttctcttcccaatcatcatggatgcttccgaaaaaccaccgggcacaaagtcggatgaaatccaattcgataccgatgccatgacgatcacaggcgacgagacttctggcacggagagccctagtccaaaaggcaatggctggagcatgataacgaggctccaggaggagaacgatcgcaacctggctgctggattccgaaagcaggaacttgggatcacctggcaggatctctccgtgcaggtaataagctcagaggccgctgtgaatgagactgttctctcccaattcaatattcccaccaaaatcagagagggccgacaaaagcctcctctacggaccatcctcaacaagagccatggctgcgtgaaacctggtgaaatgttgctagtgctgggccgcccaggctctggctgcacgacactgttgaaaatgcttgctaatagacgaggaggttacaaatcagtggagggcgaagttcgctttggatctatgcagcccaaagaggctaaaatgttccgaggacagattgtgatgaacactgaagaagagatcttcttcccagccctgacagttggtcaaactatggacttcgccacgcgcctcaaggtaccctttcacctgccagacggtatgactgccttagaataccaacaagcatcgaaaaagttcctccttgaatccgtcggaatctctcacaccgaggatactaaggtcggtaatgagtacgttcgtggagtgagcggtggtgaacgcaagcgagtctctatcattgaatgtatggccactcgaggctccgtcttctgctgggatcaatcgactcgtggccttgacgcctctactgcccttgaatggacgaaggctattcgagccatgaccgacacactcaatctatcaaccgtcgttaccctctaccaggctggtaacgggatttacgatctgttcgataaagtccttgtgcttgacgaaggagagcagatcttctacggcaccagggagcaagccagaccattcatggaggaagccggatttatctgccttgaaggctccaacgtcgccgattacctcactggtgtcactgtacccaccgagcgcagaattcgagatggcttcgagagccgcttcccgcgtaacgccgaggcgttgagagccgagtatgaaaaatcacctatttatactcaaatgatagcagattactcttacccggactccgagctcgcccgcgagcggactgaggagtttaagaaaggcatagctttcgaaacatccaaaaccctgcccaaaaatagccccttcaccgttggcttcgtggatcaggttaagatctgcgtgcagcgacagtaccaaatcctttggggcgacaaagctacatttatcatcaagcaggtggcaacactatgccaggcattgattgccggctctctgttctacgatgcccccgataactccggtggacttttcatcaaatccggtgcccttttcttctcccttctttacaacagcttgctcgccatgagtgaagtgaacgaatctttctttggaagacctgtgttgatcaagcacaagggtttcgcttatttccacccggccgctttctgtcttgctcaaattgctgcggacatacccgtgttgctgttccagatttccatgtttggtctggttctttacttcatggttggactcgcaatgtctgctggagcattcttctcctactggattatcgtgtttacgacgacgatggtaagtagcttccaatttgttcacatgttcttcatctaatcaacatatagactatgactgctcttttccgggccgtgggggctctattttctacatttgatggagcttccaaggtctctggtttgctgatcatgtgtactgttctgtacaccggttatatgatcccaaagcctacaatgcacccgtggctcggctggatcttctggatcgacccacttgcttatgggtttgaggctttattgagtatagaattccacgataacagcgtgattccatgcgttggaacgaatctgatccccaatggccccggctacgagaatgtccaggcacatcaagcttgtgctggcgtggctggagcgatcccaggtcagaactacgtgattggcgacaactatctagcgtcgctctcgtacagccactcgcatatctggcgtaacttgggtatcaactgggcctggtgggctttgttcgtttttgtcacgatcgtcgcaacttcgaggtggcagtcaccctccgactcaggtagcacgctggtcatcccccgtgaatatttgtacaagcatgtcagaaatcagcaaaaggacgaagaaggccagagatcagagaagcgagtttctgaaaccaaggatgagaccccaaagcttgacaaccagttaatccgcaacacgtccgtctttacatggaaggatctttcatacacagttcagacacctacgggtgaccgtgttctccttgataacgtccatggatgggtgaaacctggtatgctcggtgctttgatgggttcctctggtgccggtaagacaactctacttgatgttcttgctcagcgcaaaaccgaaggaactattcatggttctattctggttgatggtcgtccattgccgctctcgttccaacgctcagcaggctatgttgagcagttagacatccatgaacgtatggcaacggtccgggaatcattggagttctctgccctattgcgccaacctgctgccattccacgcgaagagaaacttgcttacgtggatgttatcatcgacttgctcgagctccatgatctggctgataccatgatcggtactgttgaagctggattgagcgtcgaacaacgcaagcgtgttactatcggagtcgaacttgtttccaagcctagcattctaatcttcctcgacgagcctactagcggtcttgatggccagagtgcgtacaatactgtcagattccttcgcagacttgcggatgctggccaggctgtattggtcaccgttcatcagccatctgcacagcttttcgccgagtttgatcagcttcttcttttagctaaaggaggcaagactgttttcttcggtcccattggagaaaattcacagggtatcaaggggtatttctcacgttacggagcgccttgcccgcctgaaaccaatcccgcggagcacatgattgatgttgtgtcgggtcaactgagccaaggcagagattggaacaaagtctggctggagtcacctgaacacagtgccatgctcaaggagcttgacgagatcattgaggccgctgcattgaagccgcaagttaccaccgatgatggtcgggagtttgctactagtttctgggagcagaccagtctggttttgaaacgtacctcaatggccttataccgaaattccgactacatcaacaataaattcgccctccatatctcatcaggattgtttgtgggattcagtttctggatgatcggtgactccgtctccgatcttcagagtgtgttatttttcgtcttcaatgccatctttgtcgctcccggcgtgatcaatcaactgcagccgaccttccttgaacgtcgcgatttgttcgaggcacgcgagaagaaagccaagatgtactcctggaaagcgttcactatcgccttgattctctcggagttcccatatctagttgtgtgtgctgctctcttcttcaattgttggtattggacggccggtatggcagttgaatccagtaagagtggtagcatgttcttcgtgtttttcctctacgagttcctctatactggaatcggtaagctgaccgaccatgttcatcttgaccccaactaacaaatgaacttaggccaatttgtcgctgcgtatgcaccaaacgcccagatggctgccatgataaaccctctcgtcctgggcgtaagttttctaagttctcgctcttcctgatatctcagctaacaccgcacttctcagacaatgatctccttctgtggcgtcctggttccctacgcccaaatcgtcagtttctggcgatactggatgtactggatcaacccattcaactacctcatgggcagcatgttggtctttgggctgttcgatcgcgaagtcaaatgcaaggagcaagaattcgccaagttcgatccactcaatggaaccacctgtggtgaatacctgagcgacttcatgcagaccattggcagccgtatgaatctcatcaatcccgaggccaccgaagaatgccgtgtgtgtcaatacacccgtggatccgattacctcgtcaccatcaacctgatggactacttctatggctggagggacaccggtattgtggccctgtttgtggtcagctcgtatgcgctggtcttcggtctcatgaaattgagaaccaaggcatccaagaaggcccagtgattgaggtttggaccttcagggggtgtgaattccgaattttcaaaagttcaatgtctagacttggaaaccttcttttcttcctatgcaaatacatagagagtatgtttcatttcttgttctttgcagatagctatagaatctgtgcgtctctactcatttcaaatttaaatatgcatcacttgatcttattgtttctctcattgaatttcatggggaaagccctatatgacagagaaactcataccgagacggagtctaggagttaccccggccaagccccagccaagctccagccatacggagaacgtgcgagtcctctggaaaatcaaagactggtggcagtgatcggcatatgagaatgggatgcaattcttataatacatcgctgttcagccttttgtctcgaatagacgatgctacatctttctacaaaaccgactaagatgggagtttccagccagatatcgcatatcttctctaataaacccaagtaacaaagtttcccatgcagctagactggtcacggaccttgtcggaccttgtccgagccaaggggaagaaaacgcccaagctgaagtcctgaaagtccagatttggcgaaagccatcggatcaagagtacaaggaccgatattcctcctatctctgctaatgatgatcatgcctccaccgtgggggtcacccaccgcacctttcatcgtatcattcccgaggtcatcgccaacgctgtcataccaccagatcttctcgtggaatttccgaaattggatttccccgcaaatcgagtgggccatcccccacgtttctccagaattccggattcacggggtaaatgcgatcttcagagctgtaatatgacatggcacatgccgcttctcacacataaatgagtgccggtcccgggatcttgtccccgttctatactacttacatctgatcaagcaccatggccggaactgaagatgccatcaccgaggcggagttggggatgaagatggacttgagccatgaggaagttgtccatatggcagagttgaccgaggaggagaaagttatcgagaaggcattgcgcaagcgcattgatgccctgatcatgccactggctattctggtctacctcatgaattatatcgatcggtacgttcatctcgtccatgacagttcgtcaacgctaatagaaccagcaacaattacgcagcagcaaagctccaaggtctcgaagaagatctcaaacttgacgatacaaagtaccaaaccggtctctctattctcttcgttggatatattctcatgcaagtgccttcgaacatgctcctaaactacatgggtcggccatccctgtacatcggtttcttcgtctgcgcttggggcctggtatcggcagtgacaagtcaagtctcaagctatggaggcattgtggcctgccgattcattcttggtttggtcgaagcgcccttcttctgtgccattctcttctatctgtctaaatggtataccaagaaggaattggcgtttcgaatgagtattttctactccggctccctgctgagtggcgctttcggaaatctcatcgctgcgggtattctcaacggcctcagaggccaccgaggactttccgcatggcaatggctttatattattgaagggtctatcacatgcgctatcggactggtcatttgcgtcgttctacccgactttccggagacatggaagcttttgtcccccgagatgcgcaaagttgcccagcggcgtcttgccattgaggctggccaggccgatgtggatgaagggggtggcagaagccaggttgaggggttcagactcgccatgaccgacatcaagacatatgtattcgccttggcatatatgtgcatcaccggagcggcgggtttccagaacttcttcccgacattggtcaagactctcgacttgccggaaaccatcaccctggtgctggtggcgcccccctatctcttcatggttgtatattctctttgtcactccatggcctctgatagattggagaagagattctggttcttcatctacccgatcccaatcaccatcattgggttcgttattttcatgaaaaccgattcttttggaccacgatacttctcattcttcttgatggtcttcgtcttcgcccagaatggaactctctattcctggctcgcgagctccattcctcgtccaccggccaagcgtgctgtcggtaagtcatatccccttagtgtgttctattgatcatcaaactaatcgaaacagcctttgcatttttcaactcaattggaaatagcgcttcaatttggaccccttatacgtacctcgacaaagagaaaccacactaccccatggctatgggtgtttgcattgcgctacagataattgctggtcttgcggctctcttcttatacttcaacttgcgcatgctcaacaaacgccaggagcgtatggaaaatgaggaaatgcagctttccgagaaggatattcgtcggctgcaggctactgctgatattgaggggattgatatttccgctgctagacggctgcagaagggattccgctatgtattgtagaagaattctagcagattgtaatttgatttgatattccaattagagtgttttggcttgtatatccatgaaagacgccgattattgtacgacagaggcccattgtgaccaactgtcgcaactctgaaccggacgtagcaaaggaatagagtccgagtggtatgactgtcatatcataggcagtttccagacttgtcgagggtgatgatgctatccaatcatgaattgaccgcatcaacccatatatggtcagctgacatggctctgaagtcattgatttaaatagtctgaacttcatcaccttcatctccaacatctctcccatctctactatctctgaattattcaaaatcaaatatctgaatccgactcagtacattattgcacacagtgtgacacccttcccatcactgatcgacgtaaccccacaccccacacccccaaccaccatgcaatcagcaatttcccgacccattctccgtgtcactaccaatccaactcttctccgatccctctctatcaccccgagcatcatgagtgcaggcgataccggtgctaccaagtcggagttcatgggccagtatggtggcacagtgcaaaatagatgacgtcatatctgacttttggcaggaaggactctttcgccagacgcgaggctgcacacgaagccatgtacattcgacaagttgagatggagaagtgagttacactgcatcaagttcaatatataaacttacctggtggtagacttgagaatctcaaacgaaaggtcgaggagcagcgcaagcatatgaatgaacttgacaaacatatgtggggatatcctgaattttcccactcgagaccaacactgacaggtcatagcgatgagtatactaggtcccagggaggtgaacagaactaggtttgccacttggttgcgagcatttcctgaacggatcgagttctcaagacatcgacatatgccttacaatcaactcaacattcgactaacagtgttataatgattttcaaacctcttttcacgataatttgttagctagcgctattaccacttggaatacaacatcaacttttatgcaggagattcctctctagtctcttaaatctttgtctgccacctccaccggtagctcagacaggcccatctggccatcacgaacaaaccaagtgacactatcagaacacttcccagatatgccaccatggctctcttcccgactttgtcgagcatctcaccgccgatggggatacagatcagtgttctaagttcccattagtgaggaactactactactgacgggatttgaaagacttacgcaatgctaacaatcgaatatgtcaacccgaacctgccgccaacctcgcttgccttagatatctgcccgatgcaggctggtgcaagacttaggaatgatcctgaagccaatccgaagatgaccgagaagatataaagccctattagggaatttccaaacggcagccagaccacgaacactgcgaatgcgcccagagcaatgagtgcagtctgggtgttgattctgccaaaccgatccgccacgcccccagccatcagtcgtccggccgtggatgctctatgccacactagtcagcgcttcgctcgagagaccaccaacatacattaccactcacacgttgagaacagccagaagaacgacactggtattggtagaaaacccctgcatgaccacgtaggttggataaagacctagaccagcgaaaacctcgagctcaagagctaccccaagtcagtacttgtttctattatccggattcccgattgaaagcgacccaccaaagatacccattgtcaaccaggtaaacctcgcatcttgcaaggaacgcaagttgatagttgatttacttctgccctttggaagacgtgccttgaccagagctgttccaaggacagacatcaccagtatcaacaatgccagtaatcgaattgtccacttatatccaaggttggtgaatccggctcttagcacaaacggaaatatcacaccaccaagacccgcgcccgacatcgaaatcccaatcgcaagggctgccttgcgatcgaaccattgaggcacactagctaatgccactgtgctcaagagggcagcaccggttccagaaagaacaccaagggtaagaacaaaatgccagtacagatggctttcggcgagaagaacaaggccagtcacatagcatagagtgccagctataagaatgcccctgggtccatagcgatcaaacatcggcccaacctgtacagaaacactcagaccgaagaaggtgaacagccccggaatccagccgactgcactcggcgaatagctggctagctgatgggaagcgaagtaattctgcaggattcccgtcgtgttcatcacaccgaatgtactcatcaagagaaagaatgaacctgccacaacacaccacgcttgcaaccctccatctgggaatttgtcgtcggtactatgaccggtcagatgagttgtgagtgtggatagctcggccggcggctcgactatggaaaatgccgaccggggagcttcttcgtcgaagtttgcattgtgaccagtgggataactagtgggatattccgaaacgcttgtcgcagccgactgccatggctcttgaactggattttgcacagatgcggtggcagccttttgcatgatgttatttctgggcctcgacagatgatcccgagtgatgatactgagccgagacctttggactgtaaaggaagcagcagaaatgaaaggcaatgcaccgatctcaacaagtcaacagaatattcagaacctaagccatgcgaagatgactcattgcgataaaggtttgtcttagtcttcatgatttcatggtggggtagaagtatacatcggcatccccttccgatcttgaagatggggatcctgggcgccaacaagatatatttcgcttgattattcggagacatggagctagcccgccttcaattgctccaatgaccgcagtggatgttgcatttctttgattctagcaatgatacctacgaaatatccatcggctcccttcccgacgcatggatagtgagcatccatgaaaaggggaatccatgaacaagggaaatctccgtgagagatacatatataaagatatcgctctggggatatgttcatatatgtccatatattcttctttctggagtccataggtatctcggagacaccacccgatatgtatattggcgtctacctcttcacggggaacttgtataaaatagtttctcccaattccaatcttcacaagctggcaatcgatccttcttaaacaaaaagacgatgatgtagagtgaggttgaagatcggtggcatgacacttgcgccacccaaccccccaagatgccgcgccaaatatcccgatttcctccactggcacttcacggcggagtggcatgatttgcaagtaagccaggtgacgttgtaatcatttcgtgaattgcaattgtcgactggcgagcatatatttattcttctcttcaacacatcgtccaagatctccaattcaacaactcaattgatacctccattcacaatgtccgcagcacaatgcaccaggctcatcgccagaaacatccctcaagttcggcgacaacgccaactaccaaatcctcgcgttactctggttggcagtccagccccaagtcgcaaccctaccattgactctgaagttctaccatatcgactctacgaactctcactaaagaagattcgaaaagaggcccacgctgctgagcccgatctacgccatgtcattgccggcatcacaatgcaaaaagtggtatccagtgccgtgcatgatgatcttctacaccgagtcgacctgatcgaaaatgcaaaattacctacaacactacccatcctaccgggcgccgatgagccctgggagcatgaagaagtcgcaccgaaccaaatatcaaatccgaatgcgtgggatatggaatctcttgaccaagcgctttgtgaaatggaacgcgctagcaagaaagggaatattgcaaaaattgtttgttttcagttgatcagtgagatgtaaaagtccagttcacattcataccagcttgccacgacctgttcagaagtttgagtgtcgttgaaacatttgttatagcgctatggattttgcttcattttatttatatatccccctcacttagctagcgagacataagctacatgttactgtcatataaaatttacttggaagttagcatttgaatggcgacctttctctttctccctctgaacctgttgtgctatacttcacagcggcgtaacgcgcgggcattctactggtccatatatataacttcaatcaaaggcgagttcttctttccttttgcgtaaacccacattactacttactgcctcaacgacacaccatttacccttgcagacttgagactttactactttgcagaattaccgcatccaaccatggccgaagaaatcaggttgtgtcacacctgcaataaagacaggccgaaggatgcatttcgggcatctgaaggtgcagcgaaggagttctacaaactgtgtgaggattgccgcacgaagtaccggaatgtgggtatatcatatgcctagatgggcaaataattccactcacttatcagatccagagactaaaaaaaaagcagagatcacgattcaaaagggcgcaaggaaacacgcaaggcaacaggggtcgatctcggccgtattatctcgctaagccagcaccccgaactattcccgacgtcagcaactcgcagacaggacttacctctgaaggcatcagtgctgcaccgacaaccaccgtacatggccaagcgacaggttcgcacgcagatcctagccagcacagttgggtcacagttgcaccgcccgttatcgaaagttccgcgcaaagcacaacaacaaccactgtcatcaccatttctaccaccaccaagaatatgatggaaaccaccacagagccagaggaagacaaggagaccgcacacgatggtatccagcggggagatgaagacctagagtcactttcaactgagcccgaatatgagcagcaaagtgaaatcagcgtaggtcctaaccaacgtcccgaattctttggctgtatgcactgcgagaaacttcgcccatggccaatggcgggactgcatatctgtttgttgtgtattcgggactggaagtggtgtgcaaagggtgcccacaatcatgccaaggcgagcttcttatgggatggcaaggaacacgatgagtgttatatgtgtcattttgcggacatctaatacttcttgcccatcgcggagactggatgtgtattttcacatgaagcacctatactttgagtgtatgggagctttcattcctggttttcttcttctccatgtagtatcttggtatcaacgtatacaccatttgagtagattgaaagagtgactggagattgaaatctgatagactagataaagagaaagtgacgggaatatcaaatatatctctttcggggtgtctttcttcatgtctttcgaggggttcgctaactatacacaacatacctagtcaataactggcctagagataggccaagaaatgggtacttgtgaggtttgcaacgtacttgtaggcatgcaaaagaatgagatgcatatattgagatgctaatgaaacaaaattgaaagcagaaggtctgaatgagtttggaggcgctgcacgtgacactcattaaatccatcaacctcggtgatctttaccaactctgcattcacaaaacatttacaatatcgtatagattatcctacaatttacaatcttgagcctgcaggttatgaattttgcctggccttgtctcaattcttcaatccatgacagtgtcctgccagaacttatccaccagggcaatgccaatatccaatcaaaaccactccgttcgggcccagtcagaatggcggagtcactccacctactgacctccacgcacgtatcaaaacctccggaggcgtcgactagtgtggaatctaaccagtgccaatgccatttgagagcaagcagatctcggacgagctcggactcccacatcggaaatctggctcgcctaaatcctgctgtgtcgttggctcgggatgaggaaccctccccttcatccctgagtttcccttgcccccatgatcggtggtacgcaacaatctgtccccgactcacgagtcaggaaggctccgaaccgccagtcgcggtcctgcaaagtctgccggctccggaaagtcaaggtccgtttacccccgtcatcgtgctcagatcgccccaggggtcgggacgctcccgtacccatttgatgcgtcccactggtcgtaacgcatcacgcaaggctaacgtggatcctgctgttagtgtgaccgagtcaagccctgccacgcctgctgtgcccatggctacccctccaaatgcgtgtatgagcatgttcccgacgaagaagctggccccatcagtcaggcggaagagattcggaacttacgggcggagatccgcgagctgagggggagaatagacgacaaacataatggtaaatttgcaagccccgcccactcagtcttttctctagcgtgtggcaaactcatgtggatggagaacaaatcgctgatgcctgtgcaggatctggggtccaggatctccagcgcctggaccagctcgagaacttatttgagtctattcgctctgcaccaagcccgctagtcgataatcttattcgcgatgttcggaatgcacatgtcggcctgaagaagggtttggtccctgttggaccatgggaaggcagggaaggtaagttatgtggtataacgattgctagaaagctacccgtgctgacagcctcagcgtacgaatcctacgattatccttcgcgacattcgtcactctcggttcggaatcgcgggttacttaattccccggtcgaagacttcaataatctgcgaagtgaggaagacgatgacagcgactttgaacgaatgtcacagagcagtggatctgactcgtctggcacgatatcggtcatgagcatgcaaagacccgcagtggatgtgtttgtcgagagattcgtggatgcatttagcccagaagtggatatgaaatctggacgagcgggtgcattgcgggctgcggctgggattcgaatgttctcgccactcatgacagacgcgttcgaggccgtctcggtggcattctttggtcgttctgtgcagaacaagcagatcgaggcgtccggattccgactatacccccgcgtgctacgtgcattgcaggatgcgctggtggatcctgaaaaatgcaaagcagaatcaacactggtgaccgtaactctcttgctggctttcgaggttggtttgataaaacactttttatccctagtcaatactaactacagcagagcgttgaacggactactcagagtggtgtccttgctcacgtccgaggagcagtgcgtctatttgaacatcgtggaccagaaaatcacatgtatggagttgaacatcttttgttcaccgaactccgtccatattgggtaagatcacagacctttcgtaatttcctcctctaattccaatggcttagattggcggtgctctggcagctcgacaaccctcatttctggcccgtgaagagtggaagaccattccatggtcagcaggaacgagtcaaaaagatattctgcaccatctacttgacctggctaccgaggttccgggcttactggcagtatcagatgcctttaaagaagcccaaatcacatctgtcatgggcgcacaagagatggctatcaaacagtctacgctttggaatggaatacgcgagcttacggcccgtttctatcaatggcaccaagagtgggttgtcgcataccctgacgggccaccgcaggaagccgaacaaaagggcgaccagggattcccaatcttccaacgccgcgacctccgcaccggggctactttcatcccaacaaaattcacatatccaaacctgctactcgcacaaaccatgtgtatgtactacgccgtgcgattgattctgtcctcaatcgacactcgaccagaggatcgcgtctcgcccatggaacagtatgacttgggttgcgggatctgtcgctccttggaattttatatcctcactgcgccgggcaacatgatcaatcgtcttgcattccccactcgagtagcgtgggaagcattcccagacggaggtccagagcgccattttatgattgaagtgctgcaactcgttgagaagcggcatgctcttgggctttggggcagttccatgccagagttatctaccaaagaagcctcgtcactgaatcgggtagtcagtagagtggacgcaaatactccccatagacgtgattttccgtagccacgatttaattagtctatatatataagggttgtgtggtccagctgtttcgaaataagtattgcgctgaggcgcagctgtcatttgaatgagtcccgatgcctacatgggcattgttctgcttaccattgaatagtataggggctgtgctccgcaccttccggctatattgccgcggtaataaaacatttgaacagatcacaatatatgaatctcagccgaaatgatgtatccaaagctcatttaccattctgactctgattggatgtttccgatggaactacatcgcattcgccctggctccaccagtgatcggcagcatcgaccactcacagggcgatataatcgatcaacaatcgatagttcgatggagattgaagaaaaaaaggagatctgcgtacctgtagaatcccttataaacagcatgcggcccggccccatgctagataccacacctgtcatacaaaatgccttcactcacgaagttggcgctctctgccctcgcgactaccacagtcgtcgcaacaggaatcaacgatttctcctgccaaagctcatacaacccagttgtcctcctgcatggtcttggagcgacatattatgaggatctgaactacatgcagtactggctgcaaacccaagggttttgcacatatgcccaaacctatggcgcatacgatggcttcccattgcttggcggtttgaaggcaatcaacgagagcgctcccgaaattgccgcatacatcaaggaagtcgtgcaaaagaccggcaaaagcaaagtcgacctagtcggccactccgagggtgctttccaatctctctacgtgcccaagttcgagggcgtcgcccacctggtcgacaagatcgcatctatcgcaccgcctacccatgccactacatttgccagcatttataacctcgcgtacacattcggcaatcagtcgcgcgaagtcgtggccgaagtgctcaataccgtcggctgccctgcttgcaacgatctcggccccgatggcccagccatcaaccgattgaatgacggtacccctattgcgcagcctggtaacagtgtcactatcattgcgtccaaatacgatgagctggttactccgccgtcgacatcgttcgtccacgaggaaggcgtgacgaatcgctggatccaggatacttgcccattggatcctgttggccacattggcgaggcctatgatttgaatgtctggcacttggtcaagaacgtgctgacctcgacggatgagaagttcttgtgcctgcttgggtcaccgggtaaataaaaagcttggggttgtgtggatggatcaattttactatatattactaataataactaatctttgaatgaataatacctatgttatcccatcattgttcggcttctcttgacttctatatatagtatagcggcagtggcccatagtacggactttatgactcaatttgcatggtttgtcttcagagattcagagattcataggcaattggggaatatccctctataacaagcgaaaagataccgggatgttgtgcccatactagattgaggagcacttgttgtccgggtgcatgtagccgtcgacaaccactcatctcatcaccccttcggacttccagatctgtgaagtcagagccccgaagaaacacctcagattgccatacatcactttattcgatctgaaacgattgctgccttaggcaccgtgagtttcttcacggactcggaactttctttctccgcacactatcttatctgcaacgcgcaaggattaaaaaaaaaccaccatgtcagagccagacaagaaacctggctctgaatccaccattcatcgaattcaagagcgatgggacagtctgaatgagatgttcgaaaacaccgacactaagcctgcagagccgacaggctctgccgatgatctcgaggcggaaatccgtcaagcccaagctcaattatcccgactgaagaagcagcgagagctcattgatatcaaacaaaaggttgcagaggaggagagagaattggaattggctcgcactcgactcctggccgcgaccaccttggaacttcccccggccacccctgcttcgactccatccagagccgattcgaagcagaacaacaaggctggtattgatggaggccaaaagaaggttcttgctgcccgatcggagcagattaccgccccagctcctgtgactgaagctgctgatcgtcgtccgtccgaggctaagccgtccgaaccgaagcctatgtccaaacccgtaaacctctcctccggtttgaaccttgagcaattgcgagccctcgccgcagctaccaggtcccccgccgcccaaacggttgtcaagtctgaatcccgtttcagtctgcaaccgtccgcccgatcttttcatcctgaatcatccgtccacgccccaccggtgcccaatgtgccggtatacaacggacgagctctgggagagttcaagaacttctctatgggtctagagcgacacttcgataaatatccggactggtataaggtcgatgagcgcaaggtcacgcgggcgcttaagcacgttgcccttaatatcgaggatgagtggaagcgacacatacgtcacctaccggccgaaaaggtcacctacggcaatttctgtaccttccttattcaccagctccagagcggagtgtacccggatgtcgctaggtcgcgctatatggatagctatcagcgaccggcccagtcggtgactgatttctccaactggatgcagcagtgggtgccgcatttccccaataacgactcggaacgtgaccgcatgcgccatctctttgaacatctgatgaacagggttcgcaacgaggctgataagactcatctggatttcgataactattacgagtttgtcgaatacctccagcgggtggaggattccatcggcagccgcgctgagtctcttggtcgccgggctatcaaccctcgaaagcgacctcgcagccacgactaagcggttcgacctagttgagcgagctccgacgaagctgacatcaactttattttacatctgcacacggggatagatcggaggtgggtggttttcttgctattcaatggggatttgccgtgcaatcttcttgcctttttccgtgtacataccggggcgttgcgaaatctttcaagcaaggtattcgtaacggctgtatcttcattcttcatcatctgaactatctctccgacgtctgtgatcactgcgaatctttcccagtttaacactagatcatctaaagcatacccgcaattctcctggcccgggctctcgccagcgcttcctcgatctgctccttgctcgccctgatagaacgcttcgtccatccattctcttttgtccaaccactagacttctcccctgcattcggctgatccccccagagacccttgtattcctcctcggtgaaatacaacgcctgtcgctcatggaaataagccaagatggtggcgctcgcctcgccgctgcagcaggggcagtaattgggatccccatgagggacgggaggtgccacggtcccatcacggagtcccttattcagcatcctgtagctggtgccgtagatttcgtagatcaggtcatcctgggaaacgtggacaaggcgcactttgaggggcgcgcggtcatcgtgacattgcgatccgagcttcagccagagggtgccgatgtcgttcaggttgccgatcccttcaaagtcagggtgttggacgaagtagccgtattcctgagggacaacgcttgtgagacctggcattaggtcggcgatctcttgaatggctacggccagagagaaggtgtggaggcggtcgatgtaaacttggaatttggagcccatggtgtatgattcaagaattcagaagccgagaggatgtttctttccccttcccttcatgttaatgagactcttgtttgcttgccatttgctgaagccacgtactctttctgtactaccgaatcaaatgggttgcaggtgggaatagaagttgagagggacatggatggtggcagttgcctaatcccccacggactaaggttctccccttccacgacttcggcttcagaatctcatgtgaatagtctctctgtactccaatctccaatatttgtcctatattactttgcagtccgattggagcccttcacagcatatcctggaatatgtttggctactggacccaggaaatatgcaggtgtgctgacccatgagcgtgctcttattgctcagcacttatctttttcatctgaacgaatcgtttttcaggaaacccccaatagaatcacgagaatcacgaggtatacggatgatcgaggtgtttatagggggaaacccccccacttggcgggaccggcgggaatcgaaaagccatcttatctgattcccgactttctctttttatattcttagccccggggcttctggacttcgcaactctttgagagtctatccttgctcttgggaattgcgctctggtctggatttgtgttttggctgtttggcgtgatggacgtgaaatccgtgcctttaccgcctggtcaggtacgccaggtacgccaggcacgccagccacctcatcgatatgctcggtggggattgcccctggctgctgcggtattgattcttttagcctggcctgtcccattaccttcgtggaacgtggttgagccttttgttccagtcacctgggacgaaattgttccttcgcaatcgctggagtaccacaactgcggtgatgagttccaatgcgcgcgactggaagtgcctatggattaccagaggacagatggaaaaggtcgcaccttcgccctggctgttgtccgactgccagccaaggttccagtcacagatccgcggtatggaggcgcagttctgatcaatcccggtaagttgttttggactcgatatgacgatataagcttataacctaggtggaccgggtggaccgggaacaatgcaagcgttcgtggcaggtcgaaatctccagctaattgttgatgcggaggccgacccaacagaaaccggagaagagactggcaacaaatattttgatatcatcggatttgatcctcgcggagtaggatctacaacacctccagtgatgtgtttccctgatcccgtatcccaaaggaactgggagctgcaagtctctgcggaaggcatactgggaagtggatcggattccttgcagagaaattggcagcggaccgaagcgctgaactcgggttgttctgtattcgatatgtcgagtccaggaacagacgagccaatgatgtcctatgtcaatacgccgctcgtcgcacaggacatgctgaccatcatcgaacgtcatggagaatggcgtgagaaggaaggacaacgagcgcagacagctcacaataagtgccatgggctggatgaaggagacacaatcttggaacgcactcaatggcgtcgcggagaagagccattgctttattggggtcgctcatacggtaccctgctgggaactacctttgcctcgctcttcccagagcgagtcacacgagctgttctcgatggcgtagtcgacatggtgaagtactaccaaggaacaggaccgaacgttatttccgacgcagatgccatctttgatcgatttgcccagtactgtaatgaagctggacccgtgggatgtcccttctatatggagggtggtccagactccatcaaggcagcatactgggaacttgaacggcagatcctcaacacctcaatccctgtcatggcatctgcagaacggggaccagaagttgtgacttggacagatatcaaagagatccagcgccttgccatctaccagccactccttaccttccctttcctggcagaaagaatgactgagttgggcaaagggaatgccgttcccatggctgacttcaagcatggtaggcacttcggtgcatgcccttccaacaaatgcagtcttgctggaccttggtcgccagaatgtgctacatcgcaggataacgtgatctacgctatggctgctattatgtgctcggatgccgaatatttgacaactatgaacactgagcagttccaagcgcaatggtctagtcttctggctgacagtgcagctctgggtgattattgggcgcaattgcaactgagctgtgttggatggaaagccaaggctaagtatccttttgcaggtatgtcctatcgtggtctctatttcttcgcagctgaccggcttagggccgtggggcgcctctaccgcttatccgatgctatttgtatcaaatactctggatcccgtgactcctctccacaggtatatactcgctcgtcgctagtggctttccaagctaacttgcccagtgcccagcacatgtccgagattttcccaggatctggattgctccagcaagaatcagaaggagtgagttatagttactcgcggtaatcccatgattcatccctgacatacttgatctagcacacaacactcacagccccatcaatctgcgtggcgaaggctattcgccattacttccaaactggcacactgccagtggtaggaactttgtgccaagccgacctgaagccattgcttggatctccgcatcgtcacgacacgatcagccaaagctttagcccagccgaccgtaagctgtttgaggcattgatggcggaggttcagcgggcgcctctgtttcctctttaaagtcccacaaactagatggaccgcgtaaccaagggttctatccaaccctgaagctaactatcacgatttgatgcattaatgatccagtgctatactagagtttagcgatttgacttggatgtgtttgcagttttatattagctattcttattttccttatcttactcagaatgtactgtttaatctatgccaactacccccaagtatcacaatatcacaccggagtaacgtccgcttgcggagaaacacaacctcggctcaccagccaatccaacatcgttgataatcagcaaccccgcttcgaggggttgcccggcattaagagttgttgaatgactctggaggcagattgtatttattccagtgtatctcgaccctcctcaatacagacgactaacagccatggctcccccaactgccaccgagaccctcgcaaacaccatcagcatgcaggcaccacagtcgtctcaggcggcgggtgccgaaaaggccaagatcaagatgcagatgcccagcatgcctattttcgaggataagatgaaggaacgggaatatttaaagggtcgcctagcagcagcattcagaatcttcggcgataagggatacgatgagggtatgaacggtcctacagcgaaatatcgagttaacaactaaaattcccattaggcgtcgctggacacatcaccttgcgcgatccggtggatccgacaaccttctgggtgaatcccttcggcacagcattcaagctgatgaaggcatcagacttaatccaggtcaaccacgagggaaaggtcattgcaggaggagagaatcggttcctgaatgccgctgcatttatgatccattccgctatccatgaagcacgaccggatgtgaattgcgctgcgcacagtcatagtatctatggacgagcgttttgctcgctgggccgaccgctcgatatcatttcacaggattcctgtgctttccataatgtatgttgtttccgatactcgccttgggaggccccagctaacacaatcaggacttggctctctactcatccttcaaaggtgttgtgctagcagaagaagaaggccagaacattgccaaagctctgggcaacaaaaaggcagccctgctacaaaaccacggcctcctaacggttggtaacaccatcgaggaaactgtgttctggttcgtgagcctggaaaaatgctgctacgctcaactgctagcggacgcagcagccaccggacgaggcggccaaacagtgaaaattgacgaagtcgatgctgcgttcacttacaaaacagtggggaccccgaaggctggctggttcagtgcgaagcccctgtttgatgtgatccacgccgaaactaagggtgaatacttggaatgagatatccacccgaataaattgccggggagattaatattttgtacgtgaattgcaacacgaaacagcgtttgtgtctttattcctaggatcttctctcctatttgttgtagtctacctcgaatactggctattgtcctgctgtcactacaaataggtaggtcccgtcaggcaaatagaaactccatatgcggggcttcggacttgactggcatatttgacagaaattaatgcgtcaatgaggatgtctcatgcattgcagttgactgtgttcaccaatcagcctggtgttaaccttgttttaaggtgaaacattcaaccccgaagagccccggaaggcgctccgcttttagttaattccaccactccaacagcagagatggtttatgtcttgtcggaggagactataaatccaggaagtgttcatgccaatatgaacccaaaccaatcattcttctattttcaagatcccccaggtgcagtgacgcttagcgactcggacaagtacacgtgcaatcttccagctcgtaattatcacaatgcactttaccataacttttctcgctgccgccggccttgccagtgcagggctactggagaccgtcgtcaagagagatgactactggggtggcagtgtctcgctcggtccatccaagtcgaccattatcaatgccgtcacgacgttaatccccggagctgccccagaaactcagaacggcgagttattcctatggcctggggtgagttcccaattttccaaagggttctcttggatcactgagaattatagatgtccaacggaaccggtgacctggtccagaccaccctcgaaagttggcccagcaacgcatggtgcggagcaaccaccggccagtggtgtgtgcgcgccagtgtttttggcagcttcggtcagcttgatggcaccggatcccccgtgagcggaaccgacgaggtgcggattgagtacaatcttgagtccgatggacaaacctggaagcagtaaggatgaattcaatggctagatacgtcaccactgacatttatttgcaggactgttacaaatggccagactggtgcccttctttcaacttactcccacgaatctggaccctacatgcgagggtaagtcaatggcccgaatagtatttatcggggctatactgaccccagttagatatggcaccggaactgagtgtgacgacaactgctcaggaaccatcgcggcgcagaaatacttgaacacggttattactttggcctcggctgatactacctttggctcgacgattgctagcgcgggtggtgccacttatactggactttcatccagtcagggtgggaaggtgtggactatcacgcagattgacattccctcaatggattgagaggctgaggaatttgcatagagcctagtatgctttgatccaaaagagataggttcagctgggcgctgggatggagagtcaagggatgagattatgttgcatgacgcagaggcacaatacatgcaagagcaggcgatatgcgatcaggatagtgtagagtatctctcgcgtgctaattgattggggagagcatctgaagcacccatcgggcttgtgattgggccctctgggaagactcggcgtgagaattcgagaaaatggaatttcagctgtacttttttcatataaagaatagcctggagaaaaccaatcatttgacgaattcatcgcttctataatggctatctcataacatgcctgcgtatatacacttcgtcgcccatactcacccccgataatcaagcagcactttcagccgcacaggaccaggggacgctgcaccaccaataccatccaggtgctttttcgactggacataagcatcaacaaccttcttagcatcgggcgtgataatcgagcatcccttcccattagcctgacagatggacatgccatgcacaggttgattcgaaatctgcgcctgaatagccgaaacatcccatcccgaccagccattattctccccgtcgccaaacccaaactcgccccaggtacatgagtatccaccccattgatccgtgggtagatgatcaccaggcgcagcaccccaggcgccctcagagtcctcgtcaaatgcaacatagcgagtctcaccgggcgcaatagtaaatgtcagagcagagtggccataccatccggtcagcttaccgtcaggcccgaccttgttccacacaaccactgtccagggctcgccgtttggacccgtgaactgcgccacgtatttgtaggcgtgtgcctcggtcggactgatattgatgatgttgcttccccaggggttgccaacattcccctggtaaaggatctcggttccttcgccttttgggagagtacgtcctccgaatccgtttgttgaaaattggccgttgggtggggttgcggtccagttcactgcagtcggattgtctggctttgggcccgggaggatctggttcactactgggacaccggggaggatttcacttggcagatctaaaaccgcgttgatgggtccgttgtttttgtgtgatggtggagatggtcgcttggcggggacggctttctcttcttctaacgagccctttggtaatgtttctgcaaggagcgttgctttttctgcctttgaaggattgtcgggcagtgtatctctaagtggggaagggctggctcctgggtagacggtgacctttacggtattcgttgctgttttggtgattgtgtgtgtcttgaagatggtagtggtctcctctggctctgttggcctgggagccggggtatttggctgagtgaattgaagttgagcggatctggtgtttgtcggagcagggagaacaggctcaggcttcggttcaccttgatgccaatgctcctcgtatgcctctggacgcgcgaggccatgcacaggatgatcagtcatatatgatgcagcctcgggcctgtttctgacaagtgtgagagtgctgtgaatcgtgttggttggcgcgcagtttccaaaaacggtggtcgtggtcgtgatggtaatagattccaccacaaaatcatctagactggtattcacattctcccaagccatgtttcgcggctccaagtcttcaacaggcggcatcaagcgccgagggtgatggcgatgtccatgtgcaggatggtggatgccagcaaagacatacccgacgaagcctgcaagaaggacgtgaatagacacacgccccatagcaaaatacaaagattaattggcaatagctccggagtggattaggtagttgataattaacgcgatagatcaaggcgtcaatggggttatattccaaaaaaataagagtcgcgctcagttgatcgaatgcatgtcgatggcgcggtgttggcggttgtagttgttgtcaagcaaacacgcgatctggggacaagacttcgctttataaagccctttggaaaagggaaagacctggactgtgtatctggaatgccatcacgcgcttggcctttgaagggcttgaaggggacagtagcagccctgaattccggggttccttggccggcccttgggcattttcgagcaattcaatgagcgttaatgtgatggtataagataagatatttcctagacagcgcgaagagatcaataagaataggagtacctcttgggaaagtaatgttcgatgcgtcgacgttgacgttcaaccgaagtacaagatgccaatttagcccctcgcgtcgcattccggccctgaatcacattcgtccctcctatttcacgcgtaaaagagaatttaagggtattcaataaggacgtaactcattctatttaagcggtcgatattgagtctgtggataaatgacaatatatatttcaatgagtgtatagagaagtgctagaaaggagtgtatatcaacagaatataatggacaaattcttccaacaaaattcagaaaagcatacagtgaaaacataccaaccagcaaatactaccgagtgcctatttttctgctttctttattttcctttcaacgcaagacttacaatgccacttcttgtcccccttccggagagaccatcatgcgcaggaacccgaaacctgggtttgtggaggtccgacatcgaccaactgggtaccagcaacagtagtcacgctgtggtcaatgccgttgaaaacgcaagtagcgccctcggtggtggtttgaatgtgggaaatgctcagagggtttactacagtaattagtgtcttcggttgtttatagcggaatatatagatagacgtaccgatttgaatccattcaccattggatgggaaactctgggtaaactgagcatcggcagctccaatgaaagtgacatgcacttgatcaccatcggggtgatcagtggaaggaggtacaggggatgtacccgatccctggacctggcaagacgcagtaatctgggtctgtggagggccaacatccaccaattcggctccgttgacgattgtcacgctttgatcaatgccgtcaaaggtacactggaccccggcagtgttggatgagatgtgcgagatgctcaatgggttttctaaacaaagttagaatacttttagtccagcgcatgattaacaaggggcataccaatcgagacagtggacccgtcagtagagatgctttgagtgaactgggcgttggcggcgccaatgaaggtgatctcaacttgatgatctctttgtttcactggaatcgcactagcagtagccgcataggcaacaaagagactgaagattgtagaggccttcatttttggacaaaagataattggaagattcaagattgttgagtgggtagttagtagattgttctggctgtgttcacacagatgagcaatgagataccgaagcgctttatatacctttttctctatacctactagacctccaagacaagcctgcagcatgataataacactggtttctaatattagatgatatgtatattcttttccatggtagaccggatagtggcgttaggatgtctaccatctagggcatagccactatgtcggtatacggagagaactttgaaatggaacaccccagatgactgtttcagatgatccaaggtcctcatttttattctcgtataactagtagagtgcagttgaagtccgggaatacaagttgagagtgatttgcatatttatttggtgatatgagtcaaatactcgatgattcattgctcggtgcatgatttacttaattactatataatatgtagttattcagacatgtccttcgaattattgaaagacacagtcaaggcgtcatctatactatataaatggccagttcctggtccgagagaccctgtgaccacccaccccatccccggatttttggattctcaaacatccacctgattgtgtctcagattataagcatctcacgtcttgtttttagttgtttttcttcgcgttttggcaatttccgcccggggcaatgatatttgagttgggtatgtcattgaccctcctttaccttcgtattcttgctgtttctgggttcaatgtgctatatataacctcacccaaccttatgcggagttacgcttgccactgatccgtgatatccttattttttggctactatactgaaaagttatgtctacaacatataagaggtagaagtgggagacaacaaatattcaaccaaccccacaatctaatccaccaatcacgacactccgtccagcttatcaagaatccaatacgcgctaaaccctttctagcaaaagatgcgccgtgtaaccaactggccaatcagatcgccaccggcgcgaaagatttacccaaaagggaaaccaagggggcctcttgcgaatataaatgcatggcgatacccatctttgcagaaaatatcctcccttgaacattatcaagaatggcgagccttcacccttttgacccaatcacaccaggggagatccagttggcggtctccgtcctggaatcagctttccccggtgtcaagctgcgctacaaacgcatcgatcttcaagaacccgccaagaatgaggttgttccattcctcgaggctgagcgccgaggtgaagtgcgcccgctaaagccggcacgtttgctgatggtgctcttccatcgattggacaatgggtctttcttcaaggctctgatcaacgcagacaccaagtccatcgtgtcagcgaaagagctgcccaaggacatccagggtccactggacattgatgaaatgatggaaatcgaggagctctgtctcagccatccagctgtcaaggctgagattgaaaagttgaagcttccggctggccacaccgtctgcttggatccgtggatctatggcaccgaggatgccaaagagactcggcgcttgttccagtgctacatgtacattgtggccaccgaccatccccaaaacaaccagtattcgctgccttgcaaattttctccggtgtttgatggtatcactcgcgaattggtccgtatcgattatctgccaggcggagccgatacccaaagcacagagacgcagccctggaagcaggtgcctactgtgcaatacgcgcatgacttgctggatgagcctctgcgcaccgatctgaagccctacattgttcagcaaccagaaggggcgtccttcaatgttgttgggaatgccgtgtcatggcaaaagtggcgattcagagtgggcttcaacaaccgagagggtttggtgctgcataatgtgacctatgatggtcgcaacaccttctaccgtctgtccttctctgagatgacagtcccctacgccggtatgttctaatactctccttgtattagccccatctaatttattctagatccccgtgccccctaccaccgaaagcaagcctttgatgtcggtgacgtcggcttcggtatcacggctaaccaactgagcctcggctgtgactgtctcggtcacatcaaatatttcgatggatatcgcacggatgcccagggagcaccggttcaactaaagaatgtcatttgcatgcacgagcaggataatggcttacaacacaaacataccaattaccgcactggtgcagcgactgtcgtccgtaaccgccagctcgtggttcagatgatctgcaccgtggcgaactacgaatacatcttcgctttcatcctcgaccaagcagccaatattgagctcgaggtgcgtgcaaccggtattctctcaacggtggccttcgaaaatgagaacggccaaaccgtgccatggggcacgaacgtcggaccaggcgttatggcccccttccaccaacacatgttctccctccgcatcgaccctgctatagacggctatcaaaacacagtttactacgaagacagcgtgcccatgcccgatgatgataataacccatggctcgtcgggtacaccacagaacagaacgtgattaagaccagcggcagtgcatcaaccagcgtcgaccgccatcgcgtctttaagattcggaacgactcgaaaatcaaccccatcacccaccaccccatcgcatacaagctgcaaaccatgccaagtcagatgcttctcgcacacccgaactcatttggctcgaagcgcgcccgcttcgcgacccgtcctatctgggttactaaataccaagatgacgagctgttcgccgccggcgagtttacaaaccagagcaagaagtcggaaggcgtggaagtgtgggctggacggaatgacgcagtcgaaaacgaagaccttgttctctggcacagtatgaaatcccatctaacatttcctgaaatggcagctaactgttcccagcattcggtctcactcacaacccccgtatcgaggacttccctgttatgcccatggagcgtgtcagtgtgatgctcaagccggatggtttcttcactaagaatcctgcactggatgtgccggcttcgaatcagtctttcaaccagtcgactttgcatcccgagccggcatgctgtgcgggttctcaggaacggggacaggtcaagctgtagataatatatgatagagggtgcgacctctgtaaataaatgcccccgcatagaagcgaatataacgaatttattccaatccaatgcacgctttgcagtcctttgtagtgcttctttgtggtgttgcttgtcgctgccgctcatccgcaatctagattatctggtgaggccagccgggctcaaagcaacgatatccccattgctgaagatgcctgtcttcaaggtgttggccgaagcaggaaagtcctatgtaggacctgccttccttcttgcatacagtacaccaaaatgcctcaaagacagcagagctaaggtcactagaagccatgggactggggaattgtagtccatgactgcgtgggaatggctgtcgaagttgtatatccaccttttgcaggttgacttcaagctgagacttcaattagagtggttgagcatgctccaatgaagatatggtgtttgaaaccaactcagcgagttgctacatctcaggtaaaccatccacaatcctgtccaacctgtcagaaattcctctgatagcagcactgacatgtaattatcttatttgctcgacgaagctaggaccggattggttattcctcaattattagtatggttaattataagccttgacacgatacagcccaggtaggtgctcaatagacgcctacgtattcatccagcagggtaattttgtaatatttcgggggctcctcataacgactaaaagacagcatggctaaaaccgagcgctcgaatagatcgacgacaccggattggcccgcaacgagacagtcaatcccctaatctccatatgaaagcaaggtagcattagtaaaccaagcaacgaccgaatgaaatatctagcgcctatcctggatagaaagcttctcaacccactcgttcgccgaaacaacatctgtcctatgtgcaaagaccttctccatcagcactcggtgcagctcctcatcacgatccatgcaacaatcctccaagactgtaacacggtagtccatatccattgcctggcgaacagtcgacagcacagctccactggtgattaagcccgcgacaacgagggactttgcatctgcgcagcgcaaaagcatatcgagttccgtagcgaagaaggccgagatgcgacgcttggtgaggatcacttctccagccacaggggagatagttgggtgaacttgcaccgacggttggccttcgatatattcacagcgtgcggcgacagaggagatagagatgttgtttacgttcttttctggatagccgggacggaaagcagtgacaacgtagataattttcacgttggccttacgtgcaaaagcgacagttgacgccaggcgttcgaggtagggctctgtgttgtcgaggcggtcaattatcccgttttggacatcgaggatgaggaggacggttgccatggctggctatcgatgtgtggagttggaagatattggaaaggtagagattgaacaaagatgagtttagatttaagagagaaaactcaagagaaagttgatatggaaaggagatgaaggtgttgttgttgttaagcggttccggtatcatgagatcccggtaccggcatgactagggatttttatacaaaaaaaaaaaagttaactaacgatcgctcacaatgttgttgaatacatgctttgggataccaagaagtgaaggcatatcagtcgagtcttcgtctcttaaccgcaaactgttctaagggctcaaccctttctttcagacgagcattctctttctctagatccccgcgatccaggattaagtcatctcgatccctctttcgtgctttagacgaccctcctatgcatttattcaagatgtctcggtgttacttgaacgacatgaccgaatcagatgagtgtgaccctggagtggcccgagaagcgtttgacaacccaggggtccggcatggtgtgatggcctggtgattgtgtaaagcctcaggctcactgtcggattgatttccctccgactcagagctgtcgtcgccctctgggatctcttgtgattgtcgtggtgagggaggtgaatactcggaggtagagtgtcggctcatttcctccgtgaatgggatgacgggtaaaggaacacttgttcgaggtgtggcccgtgttctcgagactgtccaaggagtatcattcgagtatagacggctatcgagaatggaggttctatcctcaggcgcggccgtagctcgattcccttggaggcagttgcgaagacggaattcatctagcggcacaaggcagctttgacgccaaaaatctgcagcttcttctgctcgcttagatgaagctacctctccattgatccattatgcaaactcctccacgtccagtgtgatggcgttctcattgttatcggagaatctctttctcatatagtcagtatagctcttttgcatcggcccaaaagcgatgttttcgattgggttagagaaccgttgatcgttctggggaaaagaaagacaagcgatcctgttttcccgacagcacttttcgaactccgggaagactatgcgaaatcgatgggaaatcagcagaattctctatgcgtcacgccgacctccgggtcgggtctttgactggaagacggtcttcagccagtcaagtgcatgatccgcctcggcccagcccgactgagtgaaagacaccttgattcgaccaaagttcttggtctgcggtggatcttggcttctgcagacaatgtacggaggcaggtgctttcctcgtgttgagcagcaatgcataacagatgagaatgcccgttcctctctcttgtggttttagttcgttggtcgaacgaacataaggcttgcctttcgataaatggtggtaataaatgcggcatcttccatagtatagatattgtcgttggaaacctggaatcgctgcttgatatctttaaatgcttgaaagaacttccaggctcttcgatcttcatgtggacctttctgtttccgtgtgtttcgctctttggctatgtaaccagcaagttcttgatgacgcaattagaacgccttctgccaaccgacgttgaggttgggtctgtaggtcgtgtagttgtggagatatgcattggctgtatcctttgccaagatgttataaggaaagaatccatgattcaaccaacgctctatccgctcaacaactgcattttcgtcctcgacaaagagagccggcggagccatgacaccagcttctttcgcagatatgcacaagcaaggtgtgtgtggcaagtgagatggaggcgcctcaaaagcgtacccaatattttggtctgacgactaagacggggcggttgaaagagacgcactgcgaagttcaggcaagaattggcctgaaagtctgacggagaaaatttgcactggaagtgagctctagggttgtaaacattgcccaagcctccacactgctagcccagcaaattttccggttcatatcattagattgctgcatttcgtatggctattcgagctttttttcttcaagaagtgtcaatctgggaataaagtggaatgatgctattccactccaggccatagtgacatttatccacccgtgtgaatattttcttttggcttctttttctcccgcgtaattttcccgtttggaattctgttgaggcagtgcccagagactggataatttgaaagtcagttcatgaaataaaatatcatggcaggtgttcagaggtcgtcaattcgtttttgaatggtcgcagtttactacatggagatatgaaattgaagcagcttttttagtacacatgtttcaggagggcaacatgaaaagaacagacgtggaaggacaaaaatacaaagaaacaaaagaaaaatggaaataatgatgcgctggacgttcatctgaactccagagaacctcggtgcaacgacagaatctcgtattcaacgagtccgtgatcttttggaagacgacaatggcgacgattgaatggtctcctcgagcttccagacgcaactagcatagctcaacgtcatttcctcccggtaccgtttcttctcggcggacgataccgtttcgtacctatcaaagcactctctaaaatccggaagcgacatcaccgatggtggtaggaagttcaatttgcgggatgacttgggggttttaagctgccttggtgttcgcgacggcgtgatagggacatgaaaataggagctttcttcttcgctgctcgattgctcgggctcgttctgttccgaatcatgctcggtgtccgaggaattttcagaggcttctggttcttctgggaactcctgggtgggcgttcctcgatgctgtggaccttgcagcgaccgtcgcgaggatatctgctcttggtgaacaatgacagatatgggatcatcgtcttctccaacattgttctcgtctggtgagacatggcgtctcctagcacgaattgggctgttgggctcaacggtttgagatcgaatccggtcgcccgttcgacgtttgatcaatcgtgtacggctaggtggaagcaagcaagtaacaaaccatgcgttcgtacattccgtgctccgatcggggaatccgagttcacggtcaataaaggtcgcaaattgggatggtgaaatggtgtatggacatctctgtcgtaattgtttcttcatatgctctgcatagagcttatcaagggcgttgaagatcccattttcaaaggggttgagatattcactgcctttttttggaagacagagacagatgacatttctttcccagcacgtcacaaagaattcaggcgtcacgggaaattgactatcaatcaacagaagacgtctttggcttcggtctcgttgacctcgctcccggcgcccaaatggacaggtttccttctcaaacacactattcagccaatccagtgcatgcgtcttttcagcccagccactgctattgtacgatatcgtgattcggttttcgtgccttctgggcccttgaacttttgacgttttgaaaatgacatatggcgagagcggtttgccggtggctgggtaacagtagatgacagaggcaaatgcacggttctcagacgatctccggcggcttatgttcaaaggctgcttgtccttttgaattgtagtggcataccccgtgtctgagaggacataaatatgctcattattgagtcgatggtctgatcgaagggccgcaaactgatctatgaattcgcagagcttaccatcttccacggcaggatctttatttgacggttcgcctttctctgccgctcgggaccttttgaattgttcgtgaaagtcccgattgcgagcaaatatcccaccgtgacgactggtaccattgtctgagccaccatggtgcttgaaataggcgctggcgatttctgacaccatggattgctttttcaattgaaatccgtggtccttccatcgttcaacgtagtcaatgatcgctttatcctcgacagctgtaagactgtcattagatgtctgcggctcaggaagtacgccattgccatgtctgggccccagtgcttcggatcttctcctcatccttgccgccatggcgctgtgcgacatgatttctgaccgtatagtgtgactccggtccgcccacgtacatcactctcactgatcgtccaatcaagtcaatgttagaatggcccaaggacagttctgtctgaggcagttgagtgactgggatgtccgaacaacgacgaacagaaattgttcaatgaagttgctgaacacggatttctcacgggaagaacatcaaggcaacgtgggcgttctggacaacctgaaaaataaatgtgagcattgagagcgagcaccggcttataaacactgaccaggtcccaccttgttagctcaacaaaaaaattcggttcaggctggggtacggagtatggatacctcgtctctttttgtttggtcctagattgtcaatatgggtataaagtggatgcgattctacttcgagctagtttccatagtgacaagtatccacataatgtcgaagattccttctggctttgttttcgccgttccggagagtgagtatagcggtgagcaagaataagacagctcgtcggagaggtgcgaactgaaaaaaggtaactgccaggccaacaacgccgaggtgaggaagggaggctctgtgaaacagtatctgcagtgaccgtgtttcttaatgggtggtcatgtttcatgcccaccccggaagttttgggtgtcttgaatattcctggtgtcttcggatttcaaagttcttcggatttcagagtgttcggagtcttgggagtcttgggtcttcggtatccattaaaaagtgagctatgatagacagtgaatatcattggtgaacctggctgcacagcacttctgtttaattctggtggctggcgctgcttaaggaacaataatctgctgataccgccagtcccaagccagcgagtgtgcagtcatgtcggtctggtattccgatcgcattcgttcagatgcatctgcgaacttccgaatccttagctcatatgttgggatatcccaatgagtgatgtcggaccagaattctgacagctgtcgcgggccgagtgcatcccggggagctccagtgtttgtcagcagactgtggtcccgaggtcccactatccacagcggagatgaacgagccattctcgatagaagcagatggctatgagcatgaccgagagcatgaaagcattgatgataatagttgtcacctgtgcatctaagtcagttgctcgacatccaaaggtcaagactcatcgcctgcttacataacaaactccatgacgtcgatgccaaacccatcaaacgaagctcctcgcgcacatttgcgcctttcctatggctgccttcatcattgccaggacttggccaatgacacgtcaacctagttcacatgcaaccactctgctaacctaaaacaattaccatggctgtagcatcagtcccaatcactcacggcggtgacagtgagtatttctagctcaaggatgatgcttagatactgacaagactataggtatgctagactcggtcgcagcgctgaatggtcgcgtcttcgacaccgatcccgtcattacgtacatgctactagacatgtcgcagcaaaaaaggttggcttatctgccgacatactggaccgcgctcatcaagtcagccttgcttaatcgcgcagtgatcaccgaagccgatggctggaaggccgcctctgtcatgattccaccgggtgggtacgttgacaatgcctggactcttctgtgcgctggatttctgggcgtgctgtggaaaataggactcccaggcgtcaaggtaagagcccgatattctcgcagagggcaatcctgactgagctaatgattatctagcgcctttggttcgaattctctggtatgaccgacaacgcgaaaagacttggtctacgtggacagagccagtactactacgttttcagtctcggcaccgagcatgaacatcgtggcaaaggttcgacagccccattcctgactacgtcatactgcatctcttactgatatttgtccaggcctcgccaaagcgatcatgcgggatcaccagcaggccgctcaagccgcgaaccttccgatctggctcgaagcaacatctacagggtcgcgcgctctctatctgtcgatggggtttgaggaaatcgaagagattcggcttgggaagggcaaggtcgctgctgatgctagccctcagcctgatgggccaggagtctccctttgggcgatggtgtggtggccaaccccaactcctgaagctactccctaggctttacaggccttctacttatccgtacgcttattgctagcatgtgtacgtatccaagtgctcatactcatgctcactatgaacaacccgatttattcatatttatacattgtttcatgggcgatataatgctgctatttcaacccagctaacagtatacagcctggctgtttggttgactcgacaagagacaagctcagcaaacactctgcacgctgttcaaatccttaggaataaccccagccttgacagcatctgcaagaagtcagctatcatcgtctaattcttgacgaatggaaagaaaaactcaccctggtaagaccaccggtaatcattcagctgagatttccaggtccagaagatccatccctgctgcttctcataggagtgaacctgcgccgcaaaccactttccatagaagtcggtattcgaactgggctcccaatccgacgacgcctcgatatcatccggcacagaaagactccattcgccgacaatgttgggccagttgctatcgcggttatcaccgcaggaagtgctgatgtagttgtcatgcgaggggctaacactggtatcccatttgatgtaacgatgatcatcataggccatgtaggtcaagtcgtcgagatactcgttgggatcacccgagccccaggacttatccatcgtctgaatatggaggtagtcattcgaatcgacggaaagcttctgctcagcggcacggatacgctgtatattctattagtccatacccgcgacccgaagaccgaaaatactgctcacctcaacagcctgcgggtaatacttcgaccgcatagacgacgccgacgcctcatcctgaacaggctcattgacaatctccaacatgcccacattcctcatctcatccgtctggtagacaaggtccaccatccactcgagccacttgagcgcacgctcatagttgtaatccgtatagaagcccggctcagaagcatactggcccgtgaacgcattttccgcctcctgcgcaccgggcgcaccatgcaagtcgataatgatatacaaaccactgtcactagcccagccgcacaatttcttcagctgatcaagtccaccctgggggaaatgctcgctgtcggcatcaacgatgtcctcgcgcagccagtaaccaaccggcacgcggatggtgttcaagccatagctcaccatctcattgatatcgtcctgcgtcgtccaagacgcccagtggttggcgaaggcggtgttcgcggcgtcttggccgagtgaggaaacgcagtcgaattccgagttctttccgccgcaacccatgccgctccattcactctcagcgatccagggctcgaagacgaattgggagccgaggtttacgccgcggattttgccgttggaggatttgaagaggtttgtgccatctttggcggtgatggatttgttctcttccggtagccaggcgtttgtcagggtggctagggtggtcaaggtggtgactgcggcgaatttagatatcacacccatgatgttcgtttgtaaggggactgtgaatgagattaattggattggagaatggtaagaaagagatggatttcatcgcatataaatagtctctgtcatttcccatacactccacaatctagttcaatcgcatgttatagaggatgtcatgcatgatccacgatgatattggcgtaggatgaaaccgacgactttcctatttgggaaactgggttgagacacgctgcagggtccgggggttgattggcggcagatgctataaatattgacctgcttcctcaccacgatatccacttgagattatccagggtcgctcttaattaatccctcatcctggcggtggtcgatgtttgatcatctccgaacttgctggatttggcaaatgcgggcctccaatgtgtgggccaagatcggcaggcgctacaaccctggggaccgtcggacgttaatgaagacttggtagaagacatcttcgaggtttcttctggttgtcttttgctgtacgttcatagccaagtggtctatcaggttggccctttttgccgttgaagacatcggggtgtccttactatgtaacgtccctaatatcatcgtgggccaagtagatcgggattattaaagtcctacgtcgccaaggactgaaaggcgcataagcatctgactattctgttctattgttcgaaaaagcacttaggccttcatccagcttacacgaagactgtcaagacaacgttgattatcattagagaacattaaaatcatgattgcaatcgctgcaatcgatataagaaaatcataaaatatagcctcctcacagcgccttgagcaattcctggatcaaaggcaagaagcttgtcacgtcatcgatcagcacgcttgtctcgttgacgaacttaggagtaagcagatcatgagcattttccaagagcgcgccaacatccgaaatgacagacggcttgagcaacttcttcacctcgggcaacaaatcgggcacgtatccaagaatctccttgagcgtgctgaccaccttgggggtcaagatgccatcggcgttctcgataaggtctgcggtatcgtcgacaaaggcgggggtgagcaaagtcgtcgcgttggtcacaatgtatcccaggtcggtgatgatggtggtgttcagcagtgactttctgagatcggggatcaggggaatgacgtcgccgaggagatccttcagtccagtgacgatggttggggtcaggaggtcgtctgcgctgtcgaccagaccaatggtctcgttgacgaacttgggggtcaagagggtgttggcgttggacaggagagagccaatggcagagatggtgctcttgttcagaagcgacttcagctccggaagcaaaggaatgacgtccttcaggaccgacttcaacccactggccacctccggagtgagcaggtcgctggcttcgccgaccagtcccttggtttccttgacgaagtctgacgtgagcaagtttccggcgttgttcaagagggcctcgatcgaattgatggtttccttggtcaacagcaacttcaactcggggatcagcggagtaaggtcgctaagaagcgactttagagccttgaccaggtcgggggtgagaaggccgacagcctcggtgaccagagtgttggtatccttgacgaaggagtccgtgagcaacttgttagcgttgccaagcacgttctcaattgcgctgatagtggctggcttgagcaggcccttcagctcgggaatgataggagtaagctgagtgaggagagacttcagcccgtcaaccgtatccgaagacaagagctcactcgcttcatcgatcaaactagttgtctggttcacgaagctggtagtcagcaggctattagcattgccgaggagagtctcgatctctttgacattgcccgcggtgagaagactgctagcctggttgatcagaggaccggcctggctgataagcttgccggtagtcgagataaaggtgggcgtgagcagcttgttggcgttgcccaagagtgactcgatctccttgacattgccctcagtaagaagaccgcttgcctgattgatcagaggaccggcttggttgataagcttgccggtggtcgagataaagctgggcgtgagcagcttgttggcattgcccaaaagtgactcgatctccttgacattacccgcggtgagaagaccgcttgcttggttgatgagaggaccggcctgcttgatgagctggnnnnnnnnnnnnnnnnnnnnnnnnnnnnnnnnnnnnnnnnnnnnnnnnnnnnnnnnnnnnnnnnnnnnnnnnnnnnnnnnnnnnnnnnnnnnnnnnnnnnnnnnnnnnnnnnnnnnnnnnnnnnnnnnnnnnnnnnngcctgcttgatgagctggccggtagtcgagataaagctgggtgtgagcagtttatttgcattggacaagagtgactcaattgccttgacattgccctcggtaaggagtccactggcgtcgtcgatgagagggctggccttgccgatgagattggtggtctccttgacaaatgtggcagtaagcagcgtgttggcgttggtcaagagtgattcaatcgcttgaacgttcttctcggtaagcaggccactggcatcatcgatgagagggccagccttgtcaatgagagggctggctttgtcaatgaggtttgtggtcttcttgacgaaattggaggtgaggaggttgttggcgttgtcgatgagattgtccaccttgtcgataaactgactggacaacaacttattggccacctggaggagagttccaatctccttggtgttctcctcggtcaggaggctgttggcattgtcaatgagactaccggtcttcttgatgaagcttgcagtcaggaggtcgttggcattgcccaccaaggttcggagctggttgtcgaccgggggtgctagaccggtagagagatattcgaaggtgtcggcgaaattacccaagaagctggggttaagcaaactttcaagaccacttagaaggtccccaaggccgccactacccccgagcaaactcgacaaggcatctttcaagtctggcaggatatcagacgatgtggtatcgtcggaactactatcagagctggtagacttggtgcttgaggtgcctgtatcagacgcagcggaggaggtagccttgggggccgaggaggtagtcgccgcagcgaaggagctagttacagcagccgagttatcaacagttccagtcgaactggctgcatcggctgaatctgattcattcgcatcggcaccaagagcggtctttatgccaccgaccacggattccacagggttggccgtggtcgggtctgcggtatctgcaacagcggtggtctcttctgtcgcagccacagatgcagtagccgtgttggcagcattgacggtgtcggcggcagtagtagtctcggctgcgacattggcctgattgacattgtttgcctgagcggcggaggttgtcggggctgaggttgtcggagcggcctcgtctacactgttcacgacaggggtgacggattccaccgaggctgaaggtgcggctggacttcctgtcacattgactgcgaacaggagcgcggtggcgagcgttggcaaaagacgcatgttgtcgaatgagcctatctagctgtcgtttctttggttgataccttgtctaaccagtccaattggcgtcgattccccaaacctatcgttcaaaggtttgttgcggaacaggaagagccttcgaaatattcagaaactcaaccccggagcgagtcatctctttattcgcatttcgatggcactgatcgtcgcgcagcagacagggtcctagctaagcgcaattgcactcatgtgtctttctttgcgtgctccgtacggagtacgaggtagctccatgatcgccgaggaaatagggatcgacaccgaggcagagtagcaatggcctcccatgtgatgggtagtgatgagcaattctcactataactccgctcgatggcagcgtctgaaagcttgctgtcggccgtgcctggggactaggtagtgatcagcaccaaccgggtcaagctaataaatttgctcccgaggtccagccaggtacatgtgtttgctttgcagggggaaggctgggcatccgttaaggtaagccatcgcaaagcttcgtatattggcgtattacggatggacacgggatttccggggcaaaaggccggggcaaaagcgggggatgcattatatttccccacaagtagtcaaaatgaggaacaaggccaatgatggggtggaatggagcgaacgacaagaaattggaagaaaagaaaatgaggggaggttcggacttggggctgaaagaggaaatgaacgacatgtcgctgctcatcgctcatctccgcaagctgagcagttcccagatatcagagttggacatgctattgtcggtttcctttgtattggtatacatttgaaaattaacaagcattggggggttattcatgagaattcagatctcacctacggagtatacataagaaacaatcggcaacaagtacggagtactacaacatatctcctcttcaacgggacgaaagaagttgagatcgtcgagtgtttataacaatgtccaacttggaaagctaaacggtcatctcttgttccctttttgccatttgcttcgtttttattccagatgtccgtcagcctaccttaactctgtatcccatactacctagatctcgatctcttgtcaatgcctcataccttcagcatcaagcgcgtgtccaagtcactcgagcgtgactcaaacgacctagattccagaacccatgtgcgcacctccttctgattggccatgtttcccagtagtctaaacccaaagctagcccccataaactctgaccacgatcatgttgcagtcagtcaggtccccgtggcccgtgggtaaaggtccacgggtgaggagaaggcatgcactcacggagccgcaatctgacaacttccgggactttgtcgcttcagggttttgccaaaacatcccacagttcgtcgaccgtgctcgatgggccatgtgtcatcccaaaggatgagggacatggacactttccatcttagcgaaatcttagcggagaggaacgagcggagctgccccagatactcagcagtctttcccggtcgggttgggggattgaccagcagatctcctctaacggtaccccaggcccaggcacccgctcgacgatctggaatactcgccctcggtccactcctgcacggttgtgagaacgggggaaggtggtattctctttgataaagtgggtgtcgatgacctcatggctaggagattctctcccgcgctccttgagaagaaaccttgagccgagggacagtagcctcgattgctctgtggaggcgcacgctactttcgtaggcaggggacatcggacatccgatgatgacattgagctgtgattccgtatttccttggaatcgggatatttggtagattaaaatgtctcggactggtgattgaaggaatgagggagaatcacaagatagactggtcggttacgatgtgctctgtagcggtgagtcaagggactttccagggtatacgggcacataccacacggattggtacattgggcagtgacctatcgtcgagattaaaatgatccatctcggttgggtagattcagagcctcggattgtaattttaaaagtcggtgatggcattccttcaatggtcatattggcttcgaaatatgtatcgtggtttggagactaatgcaggacagccgagatggaaacttagtagcaagtgatatagtatgtgctataaaaaacaagtgtcgcactatccattctgctctaaccgtcggctacttcaaacatttcatactagaaggaaccgccaagcgttgggcatcaaagttgctcccaagggtttattcctgggctacttgagtccttccaatatttgaaacccccaggattgcaccaactgctggtctaggatactattagttactcaggatagccgtgtttgaaacaggactgttacggagtagtgttaggcgcacggggttcaatgcataggggtattataggggtattagaggagtatctgaaccccaagtatactacatagtatcctgtccatagttcatatcggttcaacccgagatacccgaggccggctccgaaatatgatgccggcagtcccgggtccacctagaaatagatatcatatcataatatcataatagatgcatgttgctacagaagatagacggggtactccgtactccgtctctaccccgtgtcctcaaacaacatgccattacccgagatggtccaatgtcatacgaggcaggtcagcctagatcctccacatcaccccatactcggccaagtggatcaacatcagacgataccttggggacaaacgaacggggataactcggtcggccgaaactacgactccaccgtcttcggatcttctgtcagataagtgacaagccgaggtcagagctgttgagatcgactgacgtgatttgatggcccagctatgtagcagtaccggtggggaaaaggatcggccgaatatcccggcactcgagcaagacatctaaatgggaatgtgccggttctgtgcacttgacttcttcgactttcgactctcgactctcgactttccactccatacaagtttgactgcaaatatccaggaccttccttatatttggaaggatttatatatcgcattcttccccacggggtacgtgagggaaggggtatgtatatagatgctgacctaggaaatcccgaggtattcgacgattgtatattcccgacattccacgttcccacgttcctcaaacgccagcacgggaaaccgaagcaaagcagttacactattgggttccctccgctcatgctggggaacaacatcacgtccgaaacccgaccaaggatattccgcatgctcaacccttccatccgctgcagacctgcattggtggacggcatgttggggctgggttcgagagagggaggggaaggcaacacaagcggggaatatgtggtgctggatgctggccccgtcgaacgattcgtgcgggcgctgaaggcctggcggatctcacgcagggcacggagcgacgaagacagatgcttggcggagtcggtgcggttgttctggtgcatctcatcgtctgcatagacatggtccgctagaaccatctccagcctgtcgatcagctgccaggtctgggggctgtcgtcatttgcaacgagcagaaacgccgatgcaatgcttcgctgcagactgatccaggaccgtgagcagtgggaattgatctcgtgcaattcgacaaacgcatcgattgtgttgaccaggctatcgatgcagtcttcgcggatcattgcacgacgcggtgcgtccaaatgggaatgtgggtcgagggagacgcgacacaagacagagagaagataggaagagtgcaggcgcaattcggttcgctcaatatgctcggctagagaccgacagttgtcgcgataccgcagatgagaagtcgcttcagcgagcatgcgttggatttgttgtttatactcccggatctcatggacacgtaattgagatgatccgggatacatgcgcgaccgcaggacttccaatgacaaggatacaatgcgacacagagtctcgaaatatgagcggtggcccggcattgatttaggatcgaatggaatttcgggctggctgaccatagtgatcgacggtcggtcataggcaagtgagaaatggctgttctgaaaggccatggtccacctaggaaatgtgagctttagattaaccaaaagagcaaactggctacctaccagacgcgccttcgcacttcctgctccgcgagtgagaacccgctcgactcaacatggagcccgaggacaagacacattcgctccgtcatacctgatgttgtgttagcttgaccatctcattggaaacacccccacgtaccaagcaaagtgtatgatgcacctgcattcatattgtatgaaagtacattgctaatgatgagaagaatctgaattacttcgacactgggttgcgagacataattcaacattcgaagacattgatacgcacacgagactggagaaagtcagtacagcacttccgaccttcctagaatgcgacgcaccgtatacccatgaggtcaactcacggtcgctttccgggatgccagacagctggcaccccgatgcaagaaccgcaaaaaggagactgagaaaagccaacggcatcccgaatggtttcactaatccgttggcatcggctttataaacaccccctgctcgtcgtcgattatcgagaagtcgtttcgtatgtcgtcctagttgtgcagtgtctgaaagtactgggtataaaactgcaccgatatcttgataaaacgccaggaacctgacagttggaattagcatgcatcgcagaataccacagatctccggcttactccaaacaccggccgtcttccgggagaaccgcacaaacaccggcgatattgaaggtgaacgggtcagaggtccacaaatccacaaaggggtatgcagccgactcattccccaaagccagttcggcaagaagatcatcctggggcagcgcctgcgctgtgtcctccgactgctttgatttgtccaaaatatcaaccagggccgaccgcgaccccagatgtaccgcgcccgtcttcaagacattcgacccgtagacaccttccgaccgggtggaaccttttggttcgaccggttctggttctggttctcgctctggctctcgctctggctcgggcggcttgtgagtcgagtgtgtttggaagagcgagtgcagactgccgaggatctgttccattgcgaccatcttgttgttaatttcatcccactccgcctgggagatatcaattatgtccggtaaatccggatcggcgctggtgctcgaggggtgatcggcatatgagccatcggttgtgggagctgagctggtatacggggggttcgtgggggaggcgaacgtagactgctgtaatggggtggaggaagcagtggcgacggtagcaggagggggatgtttcgtagaggacggacgaccgtaggagcaggggaagtttcgtttggtgcaattgccgcaggggacgttgcgatcgcagcggaccttgctcgctcggcatgggagacatgtcttgcactcgcgcgggcggcgacggatagggtaagttggcataatgtggattttgtactctttttatttcttcacaatcggatccccgtgatcggcaaaggaattatgggaagggctgcctgcggcgaccgggcaataagagggagcggcataggaagacgtagatcgaggtgagggctgaaaatggacagctctagtgctgaccagtcggaatggcgccaataatgaattcaatagaaacgaccggccctggagcgattgatgcgtccaacagtgcctatcatcggaggtccgtgagctgccccggattgtcctgcgaaacagggaaacccttgggaacaaaataaggaatgtgaaaggacacttcttgacagtgccaaggtatgtggagaattgggattgtcggattgggaggtcggattcaatcttggaaggtgaagggtggaaaagagttgtgaaattgcccagaggcagatgatttcataacccagcggatgttcccgttcgctacggatgtgacctgatttggttgatttgtggatttgttgatttaatatacttcgagttaccttgacataggagatatacttgattactttcattggtagagtcatgtaaatggtcatttctaaagcgaataaaaggtatcactggtacatcataacgactaggaaatcaaacacgtatatgcctctatcattcacgccttagacttcttctcagacacctgcgggaccacccaccagtcatgccaacgaaacttagatccaacctcgggcacagtcacctccaggttgagagtcttatcatcggtagatgtcgcagagagagccttcttgaccgcatcaatagcaagactagttccaatgcaggcacgcatggtgttcttcgtgtcacgcttccaatcctcttcaatggctgccgatttcggttgagttggtgcggacgggtcatcaataaatgtcccattggcaagggtcgcctcccacgccttgcgcgcttcggtgatggctttcgaggcacgctccaaaatggtggcgtcggaatcaccttcgagagctgcctcgcgctggtattcctcgtatggaaccaattctggcaatgtgatagggatgaacggtttcatgcggatttcataccggagtcggtcgctggaatatgcttggggagacgaagcagacgggagcacattgtgccgggccaatacaacatacaatgcatgtagagcaatcgcaaatgcatccaccgcaatgatatgcgtagtcaacctctctagcgcgtggaacgatcggtggaacgcggacgcatgtcgagaggaactcccagagtgctcgtcagtagacatcaagttgcgttttcgtgcagccacagtaaacgtgcgaatgcgatcaatatggccgagatgtgtagagcaaatatgagaaagataccagtacatgcccggtagctcttccggggagtagattgacaactcaaagcccatctggagaatgagtcggaactggaggagcttctggtgataggcccagctactaagtgggaaagaccaggtcggttcgccgccctggaattgcagaggtggttccccactcaaagtgcggagctcgaggtccatttcttccgcctacattaagtcagcattaatactcaaatagcaaagagacacgaggcaggactcacctcgatctgtagattatcccaatcgacgagagtatggcagagtgttcggcgcatgcgacacctattgagacatgcgcatcgcacagtatcaacaaacggctgtgagggttagcaaatgggacatgtcatgatctacatgttcactaacctgggcgaatcgcttcatgaaaccatccatcttccgagcaatctggaaccgaggatcagacggcacttccacttcttcagtgttagcctcgagtaaaatactagcaggtaagacgagttccgcgagctcatcgtgtaagaactctttcacaggtacggtaccgaggatcgtcatgttgctgacaatcaatgcctgaagaagacaacgaatataaattgacggctgtggttttcgagagagcaaagtccatacggcagtctgtaaaacaagttagtgctaggactacactcaagttcaagagtacataccttgaaattgctgggaccggtataatccagcatctgctgcatgtctatcgcatcctggcacagtcgtttcagatgtgtgagcgcgtcatcggaggtaatattaaccatcggacgaggcggcactgtgctagccagctttcgttgaatcttcaagctgaaggcatctggcaccggctttcccagagcgactgtctctgtcagaggtcgaagttgagttatacacgaggcgaaattttccacagatctggtttcaagaacttcaacatcctgatgtagtgcagacaagaactcacgccgaaacactagtctgcaatggatggcatccttgagcttctggtctatgtcagtctgctccgcaacccaggcaaccgcctggtccagcaggcggtgaaagtcggatatattgaaggcagacagaagattgcgattgtataattgactgacaaaatcctcttcctagttgggtggcattagcggcagtcaaagaagttggcgagccagcctactaacctcataataatattcagtggccactcggacatgcacaaaatcacaagctttcactaatgcaagacaataagctctcaagacgaggttaaccaaaggagcatcacttggtacacggtcaaatcgagcgtcgttcatggttttgggcaccggccacagtaatttatcgagataaattgacgtgaatagcgtctgcgatagaggatgtcccttatgccacgccacctgcaattaagtcagcaacctgccatcttcatatgtgcgatattatctcccacctcgtggcatagcaactggtccatcaagccaacgacttcctctggtgtcaacggccgccgtacgtcgtagtcgtcttccagcgcctgcgcaagattttctccgggggctatgtagccactgtccatccttgagtccataatctgtgcgggttcgatcgtcgtcagctgcaattcttgtcgcacgtttcacatctggtgagaaagccgacacacctccaacgcgcccacagcctcgaatagggtgaatgtctcatctttcacgagctgccctgcatttagctctacaagtacaaatgattagacacttaatcgaagctttcgggtagtatgcttactcgctgcggcttttgtgaattcagctgtaatgtcgcggggtgcggactgctcaacgaaccgcggacggcgaaagcgaatctcgttattcggcagcatcgcgaataagttctttccacagtgctagttctattacaggacttcaaacaagtctcgtgctgccggacgtgtttcgagagatcaaatcgagggggaggcggggatgtgagcggaggaaaaagcgagtcgggaagtcgacaaccgggcctagaggtgacgtgcaacatctgaccggccacgcccgggcaatatgagaattcttacagaagttttaactaacagcttatgggtcatgtgaaaacaaagaccagtgggatttctaagctctgcccaaccagacaggccggtattgctacacatgtacatttcaatgcctcccccggaccaaaaactcgctcaagtccgtcacactcgggtcctgcatatctccaagctcgattctctcaggttatgggggaataaggcttatttctcagcagccttggcgatggcctcgttgttggcctgggcgagagacttcacttcaccctgcttgccgttctgttcatcggaacattgtcatcagtcaagattccgcatagagctcgagaggttcacttacatcccacttggcgaaacggaggtccatgactccgcggcgctcagaggcgagacgaggggcttccttcaaggagcggcgcaccgtgcgggcggcgatggccaggtagcggttgtagctggggtcgaggttagcattgattcgaaagagcattggtgcacgcgtacgtcaaaccggcggctttccaggcagcagtcattttgaagagaatgtggaggtatgattcgattgaaggggtgaaaacggttcgggtgagtttggaagcgttcgacttcggaggatcgggatgacaggatcacgtggggagcagtctacctttggaaggcggtggctagaaaagcggtgaggatttacgcggttggaatatttgatgcctataagtcacgtgatattggggtaggtctggtcagggaaagtatttatccgacgtttatccgacgtatattgatcagtactagtatcacctccagggcttcatgtcaccagcgtttatttcgaccacatccttgtacaacgaacactacaccacgccacacaccatgttattctaccccaaaatgcccgatatgtagaaatatattgctattcgccattgggtcaataatacttgcattctgttcttttcatttccttctccgaggtggtggatgtttatatagatccttcgtcacatatgtaatgatatccttatgcaaacaacattatacaatgcgacacactatatcatccagccatacatcatccgattcgtaaagttataatcgctatgctgttggctcatcaataattctattctgtgttcttcggttttttcttcgagggtggtggggtgtagaagggttgtggtgaaattatatagatcttttgtaccaagaggggcaaactgcgtatcgcctccagctcgaatgtaagtctcgcagccacgatgcgtcttcgcagcttcgaagtgctagatcagatggtgtatcagcacatgtaaataggaatatatactccaagaagcaggcttgctgtgcacaagaaggattacaatctgcctgcttttggtgcagggtatgaaaaccttccattcgggttgaccagccgtgtacaatacacgtgcttgacctcgaaaccaagagcccccgaaggcaacaacacaaaaatgtttcaaggcggtccattgcttcagagcatttgctatcccccaccactcctcttggtcaccatatctctcacttgctcttcattctcatcgacattcatccatctcccatcgtccacaacattccccatctttctgtgctttgataccaaagcatctcgaatcgaaggtgcctttttatcatatccaccaggtgagtagcccagttttgtactggttatagtccattggtttccctagcacatccccacttcctaccatagagctattgcttctgtgcatcattggcatgaggtcctgtggcacactgtggttgttgagagctccgctgccatccagtgcttagccacgacccattgcctttgtcgatgatcgggttatgcatatcaatgcccaacatctggcaagttcatctcaattgcctggcgtctgggcatgagtggcacaagtcgtccaacaagttgagaatcttgcaattttcgatcggataccgtcatccccagtacatggcattggggattggtggtattaatccacaattgcatgagaccatcgttggtcccgtgcccttctcagaaatagaggatgttgaaatcgcatgcagcatcaatagggtatcggccatcagttgctttgagcatgggcattctggaaagcttctttgggccacgctctgagatcctgcagtaatggtcagccttgtcactatctgcatatttatcttaacatatcctgcttgggcggtgctcgataccatattccatccaaatgcatactgcaaacccattctcattgtgaacactgtgtgttcactgtgtttgatccatatttctgctttatcggagtttgacagcaatgcaacaacacattggccgtgcccagtcacctacctcacgccccgtccatacattccagattcattttcttcttgtgagcacaaatgctaatgatgatattgtgcagaaggatataaaggactcgtccatccaacatgccgatcaagaaaaaagccggtacccgaaagcgcgacaatgaggcggaccttgccgagctcgaaaggctccggaaacaagttgctgaacagagcaaggcgctagaagctgaagaggcccgcagggaggaagagagccaggccaagcgccaaatcagcagccggcgccaacggacactggttcgctgggatggtaagttcccaatcttgttccgtctttctattcggggatgttgtccaactgggaacatcatggaaagatatactgttgtcacatagacttgtattcaagcagaggatttgccaatggattatgctgacatttgactgaaatagtggataccgacattcggcttctgttggccatccagtatgcctgcaataagctcagcgtgaagattccctggaaggaggtcgcggaagttatgggagagaagttcacggagggtgcgatcgttcagcatttgtctaagcttcgcgccaagcgggaggagcaggataagccaaatccgcctccactgaaacgtgcagcgagttgctataacaagaacgacgcaaacaagaaggaggcgttgtctcctccaaaggacgaaccaccgagcactcgcagcggaaagcgccgacgccgttcgccgtccgttgaggaatccgacgacgatgtgtaccccatcaagaagaaacagcctacaaagaacaagaagaaggacaaggtctccgctgctcctaagctgcgtggagagcgagaacaatccgagagcggtgactcccggaagctgctgtgtgttggagcggaatggctgcgtgacttcgctggcgacgactgtgagattgacgacgaatcggctagttctgaagagaacgagaacgaggactcaactgaaagcagccacgtcactgctcaagcggctaagaaatcaaagatcgtgacactcaagctaggccgagagcgcctggcaagtgttgaccgctaccttggtggctctgcaactttccgggagcctatggcctcaaccaacccgttgcgcgctatcaccaacatgccaccccgtcagccatcctaccgcacttacatgcactccgttgggcctttttcgcctgaccccaccactttgtttgggaacaacatctcttacccatccagtggcccaagcccatttgacattccgatttctgacgctgatcttgctggagcctgtgcttttgatgatgtggatctcacagcaccgtattcacagtttgatatcccctccgaattgcaatttgacccaatgtgcagctacctcaataccagtggttttgacaaccagttcattcccgacgatgaactgtttgcgtccgttcctgacgtagagcctcctcggtactatgggtacgggggtgaagaggtccaggaattttaatttcctgggccgatcgtcatggttcctggttgctctgatacttttcaatacttttccccagtgctttccgaggcttttttcttgtttcctcctttcttggccttttctttgcttttgtttttccttttttccttttctcgctggttggtcggaggagatgggtgagcatcgatcccgatttaacggtgcaactccggataataattcttgcgtggcatggagtcatgtgttatctgaagttgtaccctagcgcttctttcatgcgttgctcgttggccccctgcggggagcccggtagttagttaaatcaataagagcatatcgtatcgtcttctttggaagtaccttgtaggttagtggtgggttctcactgatgataaaagcgaagtcgctaattcgctagtatagaaggttgccgaacaccggatatacgtacggagtagctttccgaggtatatatttgaacacatcggcttggacctatgcatcacgtaggaatactctttcttcataacttttgaatatagactagatgttccaaactaccattctccatcacatttccaatctaataatctgctataacaccacaatatctacaatatttccactgccgatctaggtccgttcttccggctcacgtgatggttctagctgtttctgccgccaagctctggggatgaaggaagcgcctggaaaattttcgagactttagcttcatctctcccccagctttctccatctcttttctttttcccacttcaaacccccgatctctcctgggttgttgtatttctctcttcttttaatccttttaatcccgttgtttccagccatgcagcgcgctctctctacccggacatccgtcctgtcggccgcttccaagcgtgctcctttctatcgctcaacattgaacctccagcagcagcgttttgctcacaaggtgcgttggattgacaattacccgcgggatcatcttgttctgcaattgacaccgtgttccgtccattccgaagcgtttggccgttccctcgctaacagcaactaggagatcaagtttggcgttgaagctcgtgccagcctcctcaagggtgttgacactcttgctaaggctgttacctccacactcggtcccaaaggtcgcaatgtcctgatcgattccccctacggctcccccaagatcaccaagggtaagattcatatcaaaagaaacacttggccactagcaaaaatactaattattccctagacggtgtaactgtcgccaaggccatcactcttcaggacaagttcgagaacctcggtgtccgcctcattcaggatgttgcctccaagaccaacgaggttgctggtgacggtaccaccactgccaccgtcctttcccgcgccatcttctccgagaccgtcaagaacgttgccgctggctgcaaccctatggacctgcgccgcggtatccaggctgccgttgaggccgttgtggaatacctccaggctaacgcccgccctatcaccaccggtgaggagattgcccaggtggccaccatctccgccaacggtgacacccacgtcggcaagctcatctccaccgccatggagcgtgttggcaaggagggtgttatcaccgtgaaggagggcaagactctggatgacgagcttgaggtcaccgagggtatgcgctttgaccgtggttacacatccccctactttatcaccgaccccaagtcccagaaggtcgagttcgagaagcccttgatcctgctctccgagaagaagatctccgctgtccaggacattctccccgccctcgaggcctccaccaccctccgccgccctctggtcatcattgccgaggacattgagggcgaggctcttgccgtctgcatcctgaacaagctccgtggtcagctccaggtcgccgccgtcaaggcccccggcttcggtgacaaccgcaagagcatcctgggtgatctcgctgttctcaccaacggtactgtcttcaccgatgagatcgacatcaagctcgagaagctcacccccgagatgcttggctccactggtgccatcaccatcaccaaggaggacaccattattctcaacggtgatggtagcaaggacaacatctcccagcgctgcgagcagatccgcggtgttatggccgatcccaccacctccgagtatgagaaggagaagctgcaggagcgtcttgccaagctctccggtggtgtcgccgtcatcaaggtcggtggttcttctgaggttgaggtcggtgagaagaaggatcgtgtcgtggacgcccttaacgccacccgcgctgccgttgaggagggtatcctccccggtggtggtaccgctctgctcaaggcctccgccaacagccttgctggtgtcaagcccgccaacttcgatcagcagcttggtgtcagcatcatcaagcgagccatctgccgccctgcccgtaccattgttgagaatgccggactcgagggctccgtcattgtcggcaagctgaccgacgagtacgccaaggacttcaaccgcggatacgacagtgccaccagtcaatatgttgatatgattgctgccggtatcgtcgatcccctgaaggttgtccgcaccgccctggttgacgccagcggtgtcgcctctctcctcggtactactgaggtcgccattgtcgatgctcccgaggagaagggccctgcccctcctggtggtggcatgggcggtatgggcggtatgggtggcatgggcggcggcatgttctaaagcccctgacccgattcccctaaagaattacctcgagcgctcttctttgcatcgtagcctgttctgatactcggatgtttgtgtaatgtcttttcttttgtgtcttatttggtgttcatcttctttcatgttttttccccatacctgtattcttttggacgtgttctgatctccgactctctctctcctctcctctcctccctggggcttgacaaaacaggttcctctgtactatatcatgtattccaataaagtcccatctgatacggcttgctgaattatgtctttttcgggatcgacaatgtccccgcatagatctactgaagctcctaacagtctcgctagaaagtattccctacgaagtacaaataggggaaatattttcacgtaccccatatattagcaacccaactgattggctacgcgggtcggctgttttgtgcagtctatagagccataagaccaaggaagggtctagactgaggcgacgggcgaatacgacttcagacgcgcatgatacacgcaatgatgggaattaatagcgatagagaatatatgttggagtaaaggattccaatagccaacgtaagccgatgtaagtggttgggcaccgcaattaaccatgggtactgctgttcttctctcgggctcttgaatcctctccgcctggaccctttccctcgcgtcaccagatcattccgccattccagtcctgcatttttgtgcattcttgtacctgatctggattcgctctttcaatccaagtttcgttctcttcctggaataccttggccatcgggaatgcataccgcgcttgcggggaacacatcgtgttcgcccctccgtcgcctgtcaacgtaggtacgatcatgactctctgatattctagtctgtcgccaacttgcttttatagtcactgcgcgcttagagagccctgagccaatttgaatcgaaactagactgtgactgctgccggcaatggctgccatggtggatgctcgcctagctctggtgagcgatgcagatctcatgcaagcacgagcagctcttcagcatcagcagagtccagaagtctctgttccccgcgaattcatctctctcatcgtcgaggaactcatctaccgccgcgagtcgcattcctccatcgcggaaatcgaacacgaacgctcaatcctccggaaggaacttcgcaagcacacccacatcaatgaggcattccagaaagaactacgggagatcggcgagatcattacccaggtcgctcatggcgatctatcacagcgggcccgcatgcaccccctcgagatgtcgcctgatatcgctaccttcaagcagacaatcaataccatgatggatcagttgcaggttttcagtcaggaggtatcgaaagtggccagggaggttggcacggagggtgtattgggtggccaggcgaagatcgagggcaaccagggaatttggcatgaactgactgtcaacgtgaatgccatggccaacaatctgaccacccaagtccgcgatatcaccaccgtaacgacggcggttgccaagggtgatttgcagcgaaaggtacaggcggattgtaagggcgagatcttgctgttgaagaatatcatcaactcgatggtcgatcagctacgggaattcgcattcgaggttagtcgcgttgctcgcgaggtcggatcggacggtgtgctcggcggccaggctgttgtgcacggcgttgagggtacttggaaaaatcttacagacaacgtcaaccggatggcatcgaatcttacacagcaggtccgcgaaattgccgatgtcacaaccgccgttgcacgtggtgatcttacgaagaaggtgaccgcggatgtgaagggcgagatcttggatcttaagcttacgataaatgcgatggttgatcggctgaatcagtttgcgttcgaggtcagccgagtcgcacgtgaagtaggaacagacggcacgctaggtggacaagcgcaagttgaaaatgtcgaaggtcgctggcgtgatttgacggacaacgtcaataccatggcgcaaaacctcactctgcaagtccgacaaatctccaacgtcacccaggccatcgcgcgcggcgatcttagtaccaaaatcgaagtccacgcccagggtgagatcttgactctcaaagaaacaatcaatagtatgatggacgggttaggagaatttgcgggggaagtcaaaggcgtggcgagggatgtgggtgtccggggtaaactcggtggccaggccaacgttgcgggatctcatggaatctggagatcgatcagtgaagatgtcaatacgatggcagacaatctgacctcccaggtccgtgcctttggtgagatcaccgaggcggcgatgagtggagatttcacaaaattgattaccgtgtctgcctctggagaaatggatgatttgaaacaaaagatcaacaagatgatctcgagtctccgcgacagtattcagcgcaataccgctgcgcgtgaggcagcagagctggcaaatcggagcaagtctgaatttctggctaacatgaggtatgttgatcgttttactcggtttcataggctttccttttctttcgcttgtgctaactacaatgtagccatgagatcaggacgcccatgaatgggataattgggctttcgagtctggcactcgacactgacgacctccaagctcccgtgagagagactctgaatatggtacacaatcttgcaattagtctcttgactatcattgacgacatcctcgacatctccaaaatcgaggccaatcatatgattattgagaagacgccattcagtcttggtgcaacagtgtttagtgtgctgaaagccctctctgtggaaactaatgagaaggccttgggtctagtctacacagtagatggagaagtaccagattatctgatcggagacgcatatcgactacggcaggtcatgttaaacctagtcggcaatgctatcaaattcacagaccacggcgagatcagagtcacggtaaagcatgtacaggacgacaagtgcgcctcagatgaaacgacattccagttctcagtctcagaccctggaatcggcattgacgaaagcaaacttgccttgatctttgacaagttccagcaagctgatggatcgatgactcgtcgctttggcgggaccggtttaggcctcgcaatttcaaaaaggctcgtttctctcatggggggtgacatctgggtaacctcgcacatgggagaaggcagtacattctcatttacctgccgagtgaagctagctctgccgccgcctagctttgcggaccagcttgccccccaccggggtcaacgcgttctgttcttcgaccacggtcttgcgcgcagcttcccaatagctacggtactcattgagctcggaatagaaccagtcattgtgacagaggagcagttagaatgcggccagttcaaaagtgattgggtctgcactttcgacgcaatcctcatcgaaaacttggagatcgccgcaaagctccgagcctgcccggacctccaacctattccactagtcattacagctcatactgtatccctaacgctcagagctgccggtgaactcggcatagcatcctacatcacagtgccctgccgacccattgatctatggaatggcattcttcctgccctcggcaaccgcccaacccggaccccatcaggctacacacggtcgttatcaattcttttagcggaggataatgacgtgaaccaaaaggttgccgtccgaattcttgagaaattcaatcacgaggtaacagtcgtggaaaatggcctccaagctgtgcaagaggtcaaacaccaccgctacgatgtggttctcatggacgtccagatgcccgttatgggtgggttcgaggccacagggaatattagacactacgagaagctcaatgggcttcctcgtacgccgattattgctctcactgcacatgctatgcttggggatcgagataagtgcatacaggccggtatggacgattatttgtctaagccattggactctagtcgcatggtgcagactattctgaagtgctcagctatgaatcttgccccactgcctgttattgagggctaaaggccactggtatatgggttcactgcctaattgactccgcctcttatttcccccttctccaaccctctttttaactgcctataagccttttatggctgcccagtcgagtctatttcctccgaatgagctcggagcctcatttcttcccaacctccaagaggactaatgtcctaacctcagggaattcccctcctcattctcgcaatctgtacacatatcgattgcttatgcgccccaacattttgcggtggaagcgcagaccttttgaacttctattcttttgaaataccccatcgtgtcggatactctgttaacggttttctttcaaggtgatcaaattctgtctctgttcatggtgtttggttgacacgcgagatgaatacatttaaatcatgtctaatgtctaccgtggtatgccctgtctgttatcttcgcccttatttatgcatctccttcagtacacgaactcatatatgttgcgaatttagaaacaaaacattccgaagcctatttgtctctcttgttgctatggtcagaaatcaaccggtacgttgctatactatgcgtatgcgcaagatataaaagggtatcaaataggcgccgaaaacacaaaatgatacaaagaacatacagactaaacctccccggggcgtctccgatcaaatccagaatttatctcatacttccccttcttgtttcccttccccgcagaaattcgatccccctgccaccgccgccagatatcctcatcacgctgcatattccgcctcccataacccagatactcatcaaagcgtttcctaagcccagagtcctcaggcacgacgtgaataggtattttacctgtagcagaaccccataagaatgatttaatcggatgcaggatgaagtccttcgataggcccgcgccgatcttgtgcattttggatacgatatcgcgtagcgtttcgctgaaggctatgaagagggacaggaagattattgcaaaggatgccggggctggaaaatgtcagttggtatagtcatatagtgtttgagacgaaacggacctgctatttcgaacatttgtcctagggttgggtttgcctgttccccgctccattctcgggcattgattccaaacaaggaggtaaagaaagatagagggaggaagcttgaattgtcagaactgattcttggattttggagagtatgtagacttacacaacactgaatatggtgaagaccatcactgctcgcgattgcgtttgggcaacttcagcttgccaccgagtcatcttggcttcgtcgacatttgcctgtttctgcttgaggtcaaggagcgtttccacctggctggttagtaggaaaaaaaaagacgtgaacggggaacgtgggaactcactgctttctgcgctagatggctgttttctttcatctcattgatttgtgaacgatattcgtcgattcgctcttgtgctgtatcgaggaatgatttaccgcaccctttgttaccgaagtatttcaccatatttttgataacggtgtcttgttgatcgagcagctttaggatggtggatagctcgtcttcgatgtcacgcagctcaagcagaacggatagatcttctcgatttcgacgagcaacctgcaattctttgtaatcttgctgcgcggctgtcatgatcttgccgtctgaggtgcggtcatgatccgctgggcggttggtgaagcctctatttcgaaagcgcttgaaagacttcgtcactgattcggtctgattttgttaatatgatctacccaaggagttgtcacgaagggatgaacctaccaatatgctgattgactcctcgaagattcgcaatacctgcagatcatgattgagagtcttatccaggagaacagtgacagcatgcagcatgataagagcagccaagtcaccggcggtctcaaaccgacgcgagagatccccattcaactcattataaatgctgcgatgcaagttcgactgttcaaaaagcttcccctcagaggtcgcagcctcttgattcggaaagaaagtaacaacagtcttttgatccacaatccaaagccagagctgatcaaccatcaggacattgccatctagaaactcgccaatatcctcgttatcgggatcatcctgtgcagactgcagatactcttttaattgctcatcaatgcgcgccggtctgcgagtgcgcttccaaagcatctggtcgtcgtcacgagcgatagtcgagcgtagattgggatacccatattgatccaatgtgcggcggaaatgtactggaggttcgcagccgagatagctccagatgagttgggcttccaggcttgcctttgagatccggcttgggacgggcttggatcggccctggttgagtcgatcttcgaccaccttacgccgttggattaggttgcgatatgtatcccagtggagctggagtgagttagtacagtgcggaagaagggtactgggtcaattgaaagtactaacgtagggaacctgacaaatatatatgttagtgctgatattcacatcgaggacttgaaacatacatatagagcgagctgaggatccttggaaggattagaaggacgttctgaaatatccatttgtctggagtgaatgcatgcgggcttgacgaaacgtgcatggggctcgaggtgacgagctctattaaaccggttgtaccaattttcgtcattgataaatttccgaacactgcaaaagatagttagcaatgtgcagaaccgtggagttagttcatatgccctacaaattaggctcttgcctatcctcacatgctcggcgaatgacttgggatacccagccagtatgcgtatatggcacatgaatccacatcagtttctccgtatcagcctcaggtcgatcgaagcgtggaactgctcgaggtatatccggtttgtcggcattctcgttgatgtgatcacgaatggactcgggtactgccaggaaagaggattgcactggttgtgatgcagaataggtcctgttatctattagcttacatttgttggttttcggcaagcctcagtggtttacttacgaatgtggctgttcaatatttgtccgggagctgtcagaagcacttcgactgtgggattgcttaggtcgaattaattccaccagcttggtgattgagctctttcgttttagttcctgtggcggatatgggctttcattgggtgcgtcgctcgagtagccctccatgtctgcttcggtgatgtggatattcggagagggatcggatggatcttcaaagattggcctgtagggtataggggcttgcaggaaccttgatttctcatcatgatggctttgaggatggtgtggatcggagccaggagaaacgtaggatgaaccgggtctagatctaccataactgcccattggtgaatggtccaagccactgggtcggaatcgaactagtctctcccgaagacaagctgacggaccccgagagatgtactctctcagggacactttggttgaccacagcttgagcggactttcgtcactgacacccagtgcagtatcctcgaagaagccgttaatttgaaccttgacttgctcttccacgcgtaacggaatatcctcgcgctgggaaatttcaacagccgtggccacagcattagcaagctcatcgaggaatcgatctcgtgtagactcctggccatggaaagttgccgtccccgcatggtccgttgccatgggcacttctttttcatgctcaatatccaacaaacccgaccgaatcgaagtaatgggcacatgaaactccattatgttatgagtctcggtgtcgatcacctgcatagttgaatccacagtttcgagaaaagaccagaccctcatgtcagccgaaagggttttgaactggttcgacagatgccataggtgctcttgacggggacgcaactgcatcctgagcgctgccggggtctcacaatccagatgcaggagtcgacgtatactagccgcgtattcatcggcagagagataggtcgagccttgatggggagttgcaaagaaggcgataccatgacagttgattaaggtcgactggctcgcctctcgtgatgccatggccagagctgctttgacgacgagaccaccggtgctgtggcaaataaaaaaaatgggacgtcgagttgactagggaaatgtttattaaattactcttggatatgaaaagacgatgacatgtgactaacctcatgtgtccactcactatggagttggttcaacagtcgttgacccaaggtatcgattttgtcgtcacgtaggtctccatagttatatagtaggactcgtgctcgaggcacatgctgtagtagctcttcatcaagccaggataatttcgcgccaggcgctatccacgtctctctatgatgggcgccgacgggcgggacagcgacaatactgagggatgagttattatatgatggtatgataagatggaataacttactcgacatcagtatcgtcatggagagaaacaggctcaaaccacgagcgcgtctggtcgttcacgggtggccgcgaaggcatcttgtcgagtccggttgaatatagcctcagtatacaggacgaaaacaaagctgggggaaatcgggatcaagtcagaggcaacctggcgagtcttaaatcccacaaatcagaacacttgagcctcttcgttggggtccggacgatcacgccccgacacgctagtttgcccgctgacagtcgtctccagggctgtgtcagtcaaaatgatatcgctggggctatgttatattattatatatccaaagagagagacttcaattatgtttatacagagaaaacaccccagattccaaattccaaaattccacatgctaatgcaccactctataacggctcatgtatcatcagaaacgcccataacaaaagggaaagtggagagagacagcgcatatgcattataattgtacagggattatgcgtcagagtgtcgcagttcgttgacctctcgggccatgcgctttccaagctcataggttgagatcatgatggcgcaggccggggcaacttttagacatcgcgccgtccaaccgcggaataggccggcggtgccttcttcacggaagatgtgcataaggaattttggtaaggatagttgctctggcactagtgtgccgggtgatgccgtatgaggggcggcgccagtatgaggaacatcgtccatatgtcggaaaacttgctgtcgcgtcttaccaacatcgaacggcgtagtaacaagtgctgctacggatcctgaaatgcccccggaaatgaagctatcaaggaaagcttggagacttgactcttcaggctcgtgatcagaaccggaaagaggggccttctgacgcgccgcgatcagaaccttctttacctcctcgtatccccaccagtagagcccagagaaaggaacatcgcgccacatggtaagagtgaaccctcgccagagagagctatatcccttcttctgcgtcatatggtataaatcctccacagtatttttgaagtggtccgcacccgttcccggagttgcctggagacgtgtccggaacatctccagcggactggtcgctgccgccgctgcgacacgagccaaggaccccgctatcaagggcgcataaccttcagacacccgctgtttgatgggactccgttcatccgtgcgcagccagtcatagccagcaaagtagatgacattggcggggattcccatcattaaggtcgggctcaaccctcgccacagtgtcaaagttccttcattgcgcgcgatcttccgtagtccgtctatagtcgatgtgaatgttcgccgctgcgattcttcgaccgcgcaatccatcgccggatgtggatttgttccgaccgcggtcgcctgcggccctagcatgcacatctgggcatcgtttccgacccagaagacttcgcgacagcaggaggtgataccgagatttggaggaaagtttttcaaggtttgggtggtgtgggaggtaaagcgtgaagcgttatggacctgagattgtgattgtaaacggactcggacgacatccaagggtgtcactggagctgttagtgctggattccaaggaccacgagctcttccgactaacctagaagcccggtcaagacattgccggcggtcgcagacaccatccgctgcccgggagtaatgttatctgttggaacaggggtcttgggcgctggaggagagcctgtcccggatgtagtggccattgtggaatcttcaaactgcgcggcccatgacgtctctagagaagctgttgagtctgtgccgaactgattgccagtaccgtggcctgaagcaagttccacgtgtggcattcaatcaattcgatggggaaacagtccagagttctttgagcttgtgttggaagaaaaatgatgcgtcaccgggaagaggaaccttggaagtttttcggggtctcgcgggtggcggtgggcggagataagcgttgggggagatttcggtgatttggagagatttggggggacctggaggggctagagggacgtgttttttaacgatttctgatcttgtttggcttcaatgagtttgattctgtgacaacttggtttggctgtttcttttagacctccttcatacggcttatcaatctgatctgatctccgaggtcggacatgaggcgaaacaggctatttcggctcgaccaaagggaagatcaatagtggaccttatgtagtggggtttctatagattctgaagagttgaagtatccatatttcctgggttaataggtgtttacgtatgttgggtagaaattgagtcggtgcatcgcctataacatgtatactagtagcatagaagtgaaacctcaggatatatgtggctagcattctatagaatatatcccttgctaacaagtggcattggatccaacaccccctttcgctcccattggcattcgaacgtgtactcataatttgagccattcatgttccagaagctctgcagccgactttcgatgccgggtcaattgtaggcattatgtcgaaggaagtcgatgagaatgggaatttcagtcaggcatcctcgtcgtgtttcgagccggtagattgaagacgcgcgcgcaagacaaccgaagctccagctcgagtagtatattggtgggttttagatctccatggaggaaatctaacccgagtaaaagctgtcgtgctatagttcttaccgcactatcccatcttcatattttgcgcatcgaacacaaggcatacatgctgtccatttggacctctgtgtttgaattgaccctgaagacgtagcataaagtgtcggcctccattttccccagcaatatcggataacctctcgagaatttctcgcttgaagctatcgtgcgagctagccaaccaaacggtagaacactacctatagcctagtttcctcatcactttgtatgcactgaaagtgtcctaagcgaaacgggctggaaacctccggtagaataaagtctggctcttctgttgtctggtgtgaatcaagagacctcgatgtttgagaaacaggttcaaagatcttgcgagccaagaccgagaatttactcgactcaaagccattttgaaagtagtcatcatcttgagatctcatctgcagtatttgtagcatggatattgtggatcgtggatgcctttaagttcccaaacgcaacaatcacatgtcgctatacagcatagtcagctttacttctttctcggtagtccatttggtaaggcagacataggtcctgactccaaattaagaacctagcttggcaatgtagccacacacgttttcattggctctgaaaagtgaagtagggcaaaatggctagggagtatacttgacggaggattgatgcgcaagttcattccaatgctttatattatgcaatatctcgtgttaaatacaataaacagtgacttgaagaggactcctatgtgaggcttgaaaaagccggggatgccaagcctcccgagatcggcgtgtgtcatcatcgcctggagatatcaatggatgcctggatgagaacgccctccaatcactacctcgctatggacgacaacgacgagcttgagtcgttccgccaacagtggtgcgaggaggtcactcgtcgatcaaaacccaaagctgcccctgctgctcctgcaactccggctccgactgccccgcctccgactcgtcttccgcccacacgccatgaggcctctgaccgcaaagagattgaggaggagggtcccccactggcttcatttgaccccgatgagcttgcgcatcaagtcggggaactgagtgtggaaccacccgaagatgatttctcacgccgagatgtcgcagagccaacgtctgcactggaacactttgaacgagcggtcgagaaggaggccgaaggcaacttgggagacagtctttcgcattaccgaaaggcatatagggtgggttttgactgctagaaatggcacttatgacgcaaatactcatttcaattcagctagattccgctgtcgataagtcctaccggaataagcactatgcccatgtatggaagaatccgaatcagcccgcgcctactacccctaccgccgtgactcaacagcccgcagatgtaccaatcctcccgacacctgaacttatcgcgtcatttgcacacctgccaatttcacagctggatcccatcgtcgaaaacacaccgccgcctccctgcccaatcgccactgtgccgtcggaagtgctagtggagattctgcgacatgtggcgatggacgacccatcagcctttggccggatggcactagtctgtaagcggatggcttaccatttcgcccatgagcagcatatctggagacggatctgtcaaggtcgggaatttggcttccagggcatgcattatgactttgcatgcgacctgcatggggaaccaatctatacccttgcgccgcgatacactccatttcccaagggcgggcctgtggaaatcccccagccgctgtcttcgtggagccaagtgttccagacccttcctcggattcgcttcacaggcatctacattagcacggtcaactatactcggcctggtgctgcatctgcgtacacgaatctgtcgtggaacagccccatccacatcgtgacttattaccgctatctgcggttctatccagatggctcggtcatctcgctgcttacttcaacggagccagtcgatgtggtccctcatattagcaaagagaatgtgatggcagcacgcaccccagcacaccgaaagaatcaacggcgtccctccgatgcgggtcatactctttctggagctactgatgcattaccacccgtcgccctgaatacgttgaagcatggccttcggggccggtggcatttggcgtcgcccgttgacacatcagaaacttccgacacgcccacccaagcctggaagcccgactcaacttctgatcagaaatcgctcctttccgacgagcgggatctcattattgaaacagagggtgtagaccccaagtatgtttatacgatgcatctatcgttacgttcctcgaccgtaccgaaatctgctcaagtcgggccagcttctcccaacccatcgaagaacaccaagctagcttggaagggcttctggagttataacagactgacagacgactggggcgaattcggtcttcgcaatgaccgagcgttcgtgttccggcgcgtacgcggctggggcttggactgatatgattgatgacttatacacgaaagatttgttacatacatggaaaatgagatatacatgaatttgaatatattgaatatcgtttcggggtttgtatcatccctgaagctattgagagtcacaagattaaaaatgaaatacagaacgtttcaccaagaaaaatgtgataagatattttccctaattgaaaccgcaagggatctcgagaatcgccagaaatatatcaacgcaggttgctcagaaactggcggaatcgtcggggaatcgatggacgtggcccaggagaagatgttcgttccgcgactacatggtaagcctgcaaggcattggtcttgaatgcatgcgtaccaccccacaagaacaggcgaaagatacgataattatgttctccccaagccgcgataagatcgtctttggacgaatctagacgctttgcccattccaacattgtgagctcgtagtcccgagtctcattagtaacatccagcaccgcaaacccgtggtataagagctcagcaaggacgtcctgaagagtcatgaaagtgtgcgtgccacgccaaatatagtctctggtaaaagagctaacagcaaacttctcaacagctgccgaaccgtcaaggtacatacggccaccgggcttcaacacatcccacatcctgcgtgcaaatcgttgataattagggatatgctcaatcacccctaatatcacaacatggtcgtatggctcctctgggttatgatcaagaaagtcttgtacgaagacttgaccagggacattcttctcctctataacacgctgcacataacgagcgctattgggcgcgatcgtcaacgtcgtgacatggactcctcgagcaccacaatactgagtcacaccaccccacccaccaccaatatcaagaattctcatacctggtttgaggccgagagaagcaaacatggtctccattttgtgctcagaggcttcttcgagcgtctcgtccggtcgctggaacaaaccgtgggtatagaaccggaaacgcttgtcaaggaaggagaggaagaacccgtcatcgagaccgtagtgatcaccgatcgccttggcgttcatcttggtcgcggtccggagaaaatcatacacgaactggaatttctgtcgcagaggcactttctcctgtagattttggcgggcgttgaacaaggcgcccaagtcaccctcaacctcgatatcaccagatagataagctcggccaacgcccatttctgtcattggtgtgcgcagcgcactctccgagcggaaaatcactcgataaactggctcgccgatgccgactggtatcactgcgccgttgggcagctgtatttcgccgggcgtctttagtcctgctaggagtgtggccacacccgtgcggggtagactattgcgagatgcttttgacattggagattgaagatagtgttaagttttggtaattcttctgatggtgatgtatagccacggggagatgaagtcaaatacgtccaggactagatttgtaatgccaacgacgaccataggagtatttgaaatagaagatcaggcagactggatatgtccatttagttgcaagagcacgcaagacaacctgcattagcggcagacagaatcagcctattggttcaatctcaatatctgacgtgtgatagtatctgtgtcaacgtgcagcttatactccgtgagaatgccgaagaggggtattatggatctattcacaataaaaaggaaatatacacatgggagattaaactaggattctatatctcctcatcttcatcatccatcatccacaactacaaccatccacacacccacttgaccattactcgcaaggagaggcgtgcaatggacccatcgattgcgaccgtcgggattggaacgcgttgtccacttgatacgcgcagtcacactgcgcccaactttcatagtttgtagtaggtcatctttaactgccgaggaactgccaatgcgggatagaaatggtgattgcagcatgcctgggatctggagggcaggcgacgtgaacagaatccggagggaagggtatggtcgaacgaggagatactgtatcatgtattatgttagtctgtgccatgaagtttgcaaataaacatctcatctcttacgttctcatacacgcccgcaaatgacatccggaaaaggggcgatttcatctcacgtagacggacggcttcagtctctctttctaaggatgcgtcgggctggaaccatgatcgcgggtgatgcggatatgcgaggctttgcataggttggaacagatttccaccatactgttgaacagcggagagttcccgcggactgaacagttcagtcagctcacggaactcatccttctcttctgcttctggtggctccgcaatgctctcttcgtcgggatcgcggtatttgttttgtagttccatcaaggattccatcgaggctccctccattgcaagtcccgagacatcgatctgtgcgccgatgaagtatttgacacggccgtggctgtcgcatagaggtgcgcactggagcaggttcatgaatggagagccgtcacgacgactggttatgttagttatctgggtgactatattggctaaaggctgagttatagagcatactagttgagaaacatttctgaatgatgccggcctgcgttaatagcttcgcgaagtcgacgaacactgttcgcatttgtcttcgggccttgtaaaaagcgacaatttcgaccaagcacgtaatccatgccgtactgagttgttctgtggaactctgattttgttagttcgattcggaaaacgagctggggaaagaaaaacataccttctgatgcgaaaataattggattgtcaggtcgcgatgggtctgtcaggcaaaatacttctgccagtgcattcgaagtcccgcgaaacttcattggcaaggttcctcggactcgctcctccacgatcttgcttgtgatgttgatacatctggctgtgatgaatgcagggagctcctcggcagtgagagccaacagcccgtctacaacacgccgctccaaaacacggttcaccgtcaccccggcggcttccccgtccgtccggactgctgggggaggcacatcaatagagaggcggacgagcgcattagcatattcaattgccttaagcgctttggaggcgttgaggtagtatgtgagggtagaaatggagcgcggccgctcttcgagaataaagtcacgaaatcgagctagataccgggggttatttaggattgtgagcatatgttcggacgaaaacatgatgtcggcaattctttccagcttgtagagtggtagatcgccgccatcgtagggcgcaatgagatcgtatgagccggtctcttcgctgacggggttaaactctggtgctccctcattcggattgatttgctgtagaagaggaagctcattggccgtcgcatgtcgacgcagattcttgatagaaggatttggtgtgggatacgcttccatctcttcctcgtgaattgcatttagactttccaacctcggtggatgggggaagttgtccaataattgatcagtcctgtcttgtcagcgcattcagtgaaacctaccaccttgagttcaacgtactgtgacaatcgaccggactcgctgacccattcgtggtattcgtcttgaatagtctcagtgaatgagcgcaatgactctgcatcgggggttcttagcccatcatggagcccctggaggccacggagatctgtatgcgacattgtttgagtaaagaaaatacgagatccggctgtataacgtcctggaaacagaccttttctttaatagtaggaaatccttccctaggcactggcgcccctccagaatgatacatcatttcatgcactctccagggtttcattacaaggaatgcaacggacacgatggaaagagtctgccaaagtacagagataatatgggaggtcataatggcaaaaagtagatcgatcgatggtctactgaactccacgagatcggagtcgatcgttgatcgatgatgccacagtgcagcggatgacctttggggatcagctattgaactttgggttgaaaacactgactggaattgcctggaattgcgatacatccattggattgttcgcaaataggctacggttggctagttcctattcgttgcttggataattgtttgacagaggatcttccaattcccccttttccctcgaaggctgcggcaggttttggatggtttgtttaccgccttggtctcgtctgtatactcagctcccttttcttcttgcagtcaaaataccagtccctcagagacatcaccagtgggaaagacactacaacggtgatgtctcggcgtggaagctttgatttcacggttcctttagattgacgcggcgaacagagaattagaatagtctgccttattatattcttttcgtatgctttatataggttcatgacaagacgtatgccgtatgttcgagtttcgatatatgaagagaagagaccgagaataacaaatcactgcaacaccataacccacaaatataaacaaaaagtgaatgaaaccagaaattactcgttctgtaaatgacgatgaagtagtatgcagcccatatatagcaagcgacgccccaaatgacattgccatctacccactccgatggatgcatcatgtgctctgcaagtatgaaagtgttcacacctcaccccaggtgccgagcccagctccaacaccaatgacactattgctttcgctgccaccaatatcccaatagttccgactagaacttgtcatcgtccgccggctggaaatagccgagagcttggcgctctggctggcacaactggagccaggccgccgatgcggtcgtacgattggcgaggagacacccgctgtgtttgatacaccggagaattgtgatgcgcgacgggtctggggttgtgatcgggagtaggctcgcgccacgagtgggtgatgttgccggatgatggcggctcggcgggatgcgtcttgcgcgcggcgcggtggggttggtgtgtgcgcttcattgggcatgtaacctcggcggctgaagcggttgcggaggtagcggaataccatcattacatcgagtccgctttcccaatactcggactcgtgttgaagctttatcgattcggagagttggtcagatcgctttggatcgtcatcttcgattccccattgtgcttcgtgctcccgattcgagtctcgaagtgtgggcgtgaagtgcggtgatagcatggaatcgccagttgtatcagcaacggttgatgcggtcgactcggcaggtttctgagaaattccgctttctgctaggcggttgagagacatccccgcatattcggcggatatgtctttagtcatttgataataggttgtaaatgccccgggatgttcacaaatttgatgaacaaggattcccagctcatgggcgatcgtttgaagcacctttgtctgccagagtggcgaatagctgaattctggctctggttcacgagctagtaccgtttccatgtctagtggatcttcctgtgggagcggttgcgcgtccagcggcaacgactcaccaaagatcacggagagcaaggaatcatcaatcccgatgaggtcacggatcaccgtgcgtgtgatgcggcgccagaaagactcttcatcctccgagacatctttcgacagtgatatatcccgtgatagcacctcggatacacgactttgtgggctaggatcaaccgaatgacgcaggctcgatcggctggtcagactagtccgcctctgtcgggtttctcgttcgatttcctgcaatagagcccggctctggtccatgcgccattcttcgattcgctgccaccgttctcgctcgacatttgtctcgccctcatcaacagtatccagatatctctgcacactcgagtgactgtgatgttgaatatggccgtacgagggccgttgggggttgtattgctcatgctgccacagctgatcctggactgcctgactcgaggcctggaaactgcctaacccgtcatgggccgggagcatggcaggcggcccctgatcgaaccgtgttggggaaaccggggctaggtctggtattcgaaaagcgtgcagtccatcgtctaggctgtctagttcggttccatcttcgtccagttgatcgtcgagggcattctcgtcatcggcttctccctcggcgccgattccagagcgggttgcagcaaaggagccgaagtcactcagccgagaagcacctacagtacgcgtacgatcggttgaagtggtgtgtgtccgagcggtcggggagaataggacccattgtgcggtgtcgtcatcgcgctgttccgacaaggaggaggggatgtcgagagtaggtggcggaggggttgaataggaagttctgcggcgggggacgtgtgttgggacctggaaggccatcttgttgatttgatcgcagccaaagtagatagatagtacgataagcgggttcgatggtggatccagagagagggggagttaaggctgttcaagcggggattataagcattaaagtatatggaggagattggtataaataagaggaactaagaaaggaggagtagaaagaatccaagtccaaaaacaagaaaggacaagcttggaagagtgtcctggtgatgtgagggagggagattagctgataagcgggaagatgggcccgcgggagcccgagtcgccctgggatcggccagtgatctaccaatgatgcaaccggtatcggaatggtgagaccagttgtgtatccgttctgtatcgcgcgtagaagaggtcataagataatgtagagacatgttgagtatattacaatattgggtacggagaagtgaccctagtactatggcttgaagtatggcaggtgcctcaaggagtataagcaggcagaataagatcactggtcaactccctttagaatcactttctttagaatcactttctttagaatcactttctttagaatcaacttcctttacggagtagattaggaagtatgttataaagtaaagtgttgttgtcgccacttcagatgccggataatcacatgatctgttgttatccattgggtcacatgtctttcagaggtatagaactaaactattgcgaacatcggcgtttttgaccttcataacatcggtccccgattccttggccacttggcagaagatggtcgtgtgattggattcttgatagaacgtatcaagaacgcccggcatcaaacaccgcgatacaaactgatgcagctttctcattcgtgattcaacggctattttacaaattccctagcggatccatcacgtccaggtgggggagatcttcttcaaataatttgttgcctatctttagggtgttgatatgtagttagttagttaactagttaactaactagttacggagtagttacccccttagataatcgtacccccgaaaatttaggcgcaccttcctaatcgggtatagatattgtcgctctccttcttaagttaaacttcccagtagtaagacagaaggtacctacaatttgtatgtaaactcctagcaaaaataagtcactcctaccatatcctcaggtatcaactacttcactgcttcatccttgcccttgctgatgggagcttcattctcttgttcgcaatgtctaccacgatttccatcaggcacttgcgaccgcacctgagtagggggtttgcagatttataccgaaaggacagatggagagaagtgaaagatgcgaatttgaatggtatcatcgctcacggggtatatattagactactataatatagcatctcgagccgacgatcaatccttcccagctaaggcctctccgacccaatccatctgcacagcactgacaccacgcgcgtaactacggttggtgaatacgaattcgttgtacatgattgcctcgagctttttgccgtaaagcacactagacgggtgaatggcgacggtttggtttccaacgatcgtacgataactgccatcgggcacgagacgagccgtattggtcgcgaatccagctaggaagctctggagaatgaggatgggcgaggggtcgtgtagtgaggtattgttcagggcttcgttggtgagcagcttggcttgtcggcactgggtgcggagttgcttgcggacgtcctgttgtggcctcgttagtttcatatgactgctgtccaatcatgtactactcaccatgactgattgcatcgcccggtgggataccaggtgtcgctctgcccatgctttacggtcggcgtgttcagcggcatacacacgaacggtcgtcagcattgtgaggtggtcaccctcgcgccggtatagatcacgacgggctgcttctgctgcctccttcttttcttccgaggtggtgttcaaaaagatgttctccacactgagacatgaaataatatcaataacatctagcaaacattcaggcccattttcgccagctgccaacagtacacgtcctagagttggagtcaatggtagcttggcaatatgtaggccgacggcgctgatctttccatcgtcttcaagcgcattaatgttcaatagctgcagaagagctttctcgagtgcttcgcgtggtggccgcgtcaggaatgggaacccaacaatgtcatcaacgccacgagccttcatgttcagtagggcttggctcagatcacagcgcagaatctcgggcgtgtttgtctcatccaaggccagatagtctttctctgtgtacaagcggaaacattgaccaggagcctcacgaccagctcgacccttccgctggattgcagctgatttagagataggctttactaggagcgagtcaagaccaagacgagttcggaactgcttgactttggccttgccgcagtcaatcacgtgccgtacaccagacacagtgacagaagtctcagcaatattggtagatagcacaactttgcgcgttcgtggtggagcaggggcaaagacccgttgttgagcagcctgtggcagcgcggcgaacagaggtagaaccaggatcttaggaagtgatgggtccatacccatggcgtactcattcactaggtgttccaatgcctcgacggtttcctggccagtcaggaagacaaggatatcacccggcattggttccttctgatgaatctgaaagatgattttcagcgctgcatccacgaagtcatgtactggcgcgggggagtagatagttttgaccgcaaattgtcgacccttaatacggcagacagagatatcctttggactcgaagtatccattttgtcggcttcagcctcgactccctcaatagccttctgttctggctccggtcttttgaatccttgttggaagaagtctgtcaaactctccatatcagccgtagcactcatgacaaccaccttcagcggcacaccacctcggccctccttctttccagatacaagattacgcaggaatccaagtgtcagatccacgttgatgcctcgttcgtggacctcatcaaccacaatagcgctgtacttagtcaagttgggatcgtgcaacatctcctggagcagcattccctcagtcaagaacttgatccgtgtactaggcgatgtcgacgtatcaaatcgcacagagtagccgactttgctggcaggcgagtgcgatccaagcggtgtacccatctcctcggctacacggcgggccagcgaaatggcagcgactcgtctcggctgcgtgatagcgatgcatcctccgaccattttcttttccgtcttcccatcccgcgtgatttgcgtaggtacgggccgacaccagaattcgtctaccaagaactgcgggatctgcgtactctttccgctacccgtctcaccgaccaacagcatcacatcttgttcccgtagcagatcgcgaatcaaatcagcattttcgaatacggggagctttcgccgtgtctcgaggagggctttggccttttctcttaaaggagtgaagttggttttggtatcggtgaaaggtttggacttcgacttcgggtggaattttgttgttgatgggccgtttgtttgagatgctgcatgcggccatttttttggaacagagactgatctttctacctccttggcagatgcagggatttccctcggttcatcttgatcggcggggttggaggcttcgggctcatcgagcttgcgcttcttgtttctcttcttctttcgctcgggtccttctgtgggttgagatgaaagggtttgctttaaaatcctctcatcatccgactccgcgaacacggtgcgaaccttttctggcattttgagttgagacgcgaaagaatgttcaccaggaagctcgaatctgaaatttttgccttatcgataagataagctgataaacattctccttatcaacatcatcagccctagttaactagcggcccttgttattcatactccgatcattttactttcgtggcatcgtgacacggcacgaatgagctgttttaaatatatactataagcaaagaaagtaaattatgtggtcattcccttgttcgagtcttttgactacaatatatgtaaagtagaattaggttggcgaaattaaattgacgcttgatcagtaagacaaaataccgaaaaatctggcgtaaatatcctcctttagtacctttatttgctacctttcgctctttgcttacaaccttggaataattaacactatatgactttgattttggtatccttgaacagagtgctagttcatgatcgtgatttatgtaaagctctgtgatggaaaatcgtgcagcgtattttaccacacgactataacaaaaaccaaggtccctgtttaaggcctagaggggccatatcccattctgacactctggcctatctaaaatttggctctgctggaggaagagaaaatccccgtggtctattctattcacgccgagtcgcttctatggtcttctccgcatcaacccgcccttggactcaagatctttttttggttgtccctgcttgatactcttccactctagagtagtcgcacccagtagtgtcagacacgagagaatcaaaccgacctgaaacaccttcttgagcgcttcgttgtaggagtagagaaccacgtcgtgcagatgtgccggcattgaattcagcagctccgtgacaccacccgaggtgacaagacgggggttgaaccccggcagcccggaaagtttcttcaccagctgattggccagaatattttccccgacggagacaaagatagctgccccgatcaattgaccgaacagcatcagtgctaagccagagggcacgtcgggctttggaagaacagtttgtgcggcgagatttgggacttggaaacacaagcccagaccgattccgtagacgatctgataaccgatccattttccttccccggtatctacctggaaagtggtgaggagaccggctccgacggacatgatgcaggatccgataatggccaatggagtgtagtatccaatcttggagtttatgattccaccactgattgagccaacaaccattgatatcatcgtcggtagcagacggatgccggattccacagcagaactgcccttgatggattggaaccagattggaaggaagtacactgtgattgaagtcagtaacatgaaataatgtttgatagtgcggtttcattaccaaagatatagattcctgatccgacgcagagtgtctgccagaagcctgaaatgatgctgcgctgcgaaaagatgcgaactggaagcgtagctgtcttcggaagaaagacctggacgacaacaaaagaaataagtaagacgctcatgacaaccaggcaagccaccacgcggctactgccccactgcaaaatgtcagctatagttggaaataatggtgtacgggacttacagcatacgtttggcctccccattgaagtgccaatatgagacagaccacgccagatactagaaatgtagtgccgaaaaaatccagttgcagctttttttccgtccaggagacctttgttgtatcctgcttggggacctggaggcagaaggcaatgaagacgatggcagcaccaccaattggcagattaatataaaagcaccatctccatgtcaccttcgacgtaaagacgccgccaatcaagggacccacgacagaggcgatgccgaaaagggcgccgaacagtccttgaatttgcggacgcttctcaagaggaacggcatggatgatgcacattatctaagtgaatcttttgtcagcaattggcacaaagggtaggggctagaatcaacttacagttccagccagtattccagcagcaccgactccacagattgctcttccaattatgaaggcaactgaattcggcgccgctccacaaatagcagaggcaaactcaaacactagaatactgacaaggaagacaattctgacagaaaagagcttgtacagcttgccgaacaggagttgaaatgcgcagcatgtcaacaagtacgagcttccgtaccagccaacgtggtcgaaggaattgaattcatcggtgattttgggtatggcctatcaattgcgtatctctcagcgctagaattagactgaattcaatgtatcatgatcataccgttgagataattgttctgtcaagcgcaactaggaacatggcgacaaaggccgagacgatgagacagacaaccctaagggtggactggttctcaggtgggcccgaaggacctggagagcctccagttttgcctggtgcgacatctttgactggtgcatcataatgttcatgcaacaactctggagcacccattgtagccgttttggtgctttcagatgtagaagtgcgtagtggagacataccactaagcaagatgcgaccgatcggttattgatgcgcgagagataatcttgtagaccataataaataccaaggaaagctcccatatttaaaggggcccaagggacaaaacatggtcggcgatttcgcattttgcagaggatcaacaagatggtcgggggttagtaagtgcgacggttagcaagtggcgttgcttcggcacttataaaacccgacttccccttcccggtgtttctctcagtcaacccaggcttcggggtctaggctctattatttgacatctctgacgcaacaggataatctcaggtcatggcgacgccaatctccccatccgagcacacagccgccgtcaaggcccggcgcgtgctggcctgcgtgctgtgtcagcaacgcaagatcaagtgtgatcgtacattcccttgcgccaactgtgtacgtgccagcgagcagtgtgaacagtcaacccgccagcgacgccggaggtttcctgagagagagttgctagcgcgcctgcgacgctatgagagcctgcttcgccagcataacatcgagtttgatcctctccatacgcctactgcaaaccgtaggtctcccagcgaggatggccaagatggacttccagagggtgcccactcagaaggtgctcttcgtgatacggattctcgcccgtcgagagaaaagaaagcagtcaagcctaaatccttgtatgaaactcggtgttattcttctcgtgaaacatacttctggatgactaatcagtagtaggaatctctggcatgctatgaatcaaaaggtatgatcgatcgcctctgtgagtaattgtgggctcactgacaattacgaaagactattgatcccaaggatgatgatggaaacgacggtgacgacgacgatgaaaacgacaccgggttcctccacgacaatgttgatatacgccacgccgtaatcaagaccgcatggaaccatatgttccaaggcaaaagcaacgaccacttgttcttcggttcaccggcagggaacatcgatgacctttctgcttcgcatccgacccaggtacagatcttcaggctttggcagatctacttggataacgtgaaccctcttcttaaagtaacgcacacacctacccttcaaacacgtatcatcgatgctgctagcgacatcgccaatgtcgatcccatattggaagcattgatgttcagtatctactgtgtctccattctgagtctcacagaagatcagtgtattaccttgttcggatctcccaaaaaggatcttttgaaagcctatcagtctgcatgccagcaagcgttacggagttgttgtattttacgttccagtaaccgtgagtgcttgaccgcattgtatctgtatctagtaggtgtgtccaaactttttgtctacactcactgatttttgcaggtgtcgaccaggcctgacacggaccctgtatctctctcatcaatgcttagcgttgctataaggatcgcccagcggataggcattcataatgagtcgttatacagtaaatgttccagtctcgaggcagagatgagtcggagactgtggtggtcgctcattatctttgataatcgcatctgcgaaatgtccgattataaaaccacgtcgctagctcctacctgggactgccgtattcctctcaatgttagtgattttgagcttcagccagatattagagccccacccgcaacaagcaacagaccaacagagatgctctttgctgttgtgcgcagcgagctcgccgactttgtccgtcacagcaccttccacctcgagtttaccaatccgtttttgaacacgaccgcccgccgatctaccaccacagacgagggggagggacttctagcgctcgagaagatgatagaggagaaatacctcacattctgcaatccagagaacccactgcatttcatgacgatgtggacaatgcggggctatttggccaagaaccgcctcttgcaacactactctcgatacttggcgggctctgtgcagcagacagctacacagcggaactcaggcatctctcacgcactgcgcatgctagagtgcgataccaacctcatggcatcgtctctcaccaagggatacctgtggcttattcacttccacttccccttccccgcgtacattcatatccttcaggatctgaagaagaggcccatcgagaaacacgcagaccaggcgtgggaggtcatgagcaataactacgaggtccgcatgatggatgctaaggaggaggaccgccccttctttatcgtcttctgtcggattgtctttcaggcttgggaggcacgtgaaaaaatagcgagacagcaggagacgcccctagtgccaccgcggattgtgtcggatatccggaataaagtaatgcatatgatatcgaatttcggacaagacgcggacacaatgcagcccggtggttccctaggttccaatatgggtgacctgtcgatgcctactgagatggatttcagtgttcctggcataacatatggtgctgactggcaggttcccacgagtttgggaccgtgggggtatcctgagattcctgggccgaacttaacggacgtggatgtgaatcaatttcttttggacacgatggagtggaatgggctgcatgtacgaacggggtgagaaaaaaagaaattctcattcgagatgagaattatgcgatttttgtacctgttgagttaagaacatagtcaattgaatctaggggacctcagcttgaacgtgcctcggatagtataatgtccgagctgatagctcgggagttagcatgtccgttaagtggagctgcattcctcgctgtgattggcttgacttgagcttggatgcccagaaagccaaggttggcggcgccacggatccacccgtaccacatcgtggcaaagtcaattgtatacatgcggactccgaacccggctgcctgcaattctctataaaagacactccctatgtcttcatatccccatcagctatcagagtcatagttttacttggtacactaaaatcggtctttcaaattacaacttcaagcatgtctatccgagccctcaaccagaactccccctccttgaactttgccgccaacgcggagggacagggtccatgttgccctttcttccgtcctcacggaggcgagtatccttactccaacaaatggtatcttcagtctggcagcgatcaacccggccacccaggccatccttacttgtctccgtgggccgaaaccggcgacaaagaccaggacaatgaagccaacgacaacagctgggataccaccaaccctcgcaagccataccaatgcccagggcccgcggaagtttatcctccgcacaactttcctagcgcctctgaaggccgcaagccttgccctttcccgggctaccctcaacagccgtacacctacccagttctcttccatggtatcagtcacatgcccatcccggccctgcggagtgtcaaaagccatatccttccctctggaatgacgagaaatcccagccctatgctcgcaagccgttggggttcttgttattgaggtgccaaagacagagccggatgatgatgccgaggctaagagggttgaggttgagtaattagaggtttggtatagataaaatagtcagtattaaaaacttaggcctcatacacggatcttcctcccatgtgtagattatcaagaaaatggaaatttcgagctcaactaatccccagttgacatatatttgaatttttcacctaaggaccaacttatttgattatgaaattgttcttaataaaagctagttattagaatggtctggacagtgaagacgggaataggtcccgggaggcccgaaccttattcttctaaccaatgagaattgatattacataatgattcccatcacagacatcgagcaaaccgaaggataaaaaaatcagtcacgacgaaaatggtattacggccacatctgacgagttagaggagggaccgacaaaacggaagttaatcacaggcctgccttcaaattaaaattctacctggcttaattcgtgacgattgcggagcaaagcgaagcaattaaatcaacctcgttgttttctcctatgaatcaatgcggtgaaatatcatcggccaactttggcagaataatccaaccggcagaatgaatatagattagatggatatcgcagggtccgcctcgatagcacttgggaggcatccaaagcagccgtcaaagcattgaaacatggaatccaagccctggctgataattattatttcaagcgtattacggactggcctgcttcttggatgcatccgagtcaagcgaaatgaagattctgatatggaaaaatccagaaacatgcagataactgcccgtcaggtactctgagagctcaaagagcgaaaataactgataaattgaaagcatatatccgttttaagaccatatctagtcttataatttcaattagtatgagattacatggcgataaactcatagttgagagctacctaattaggcttagtgcccctcgatttgcttcctagacttaccgcccaaggactagtactatttatcgtaattctgccgatttcaaacacgcataatctaaaatgccaagaagccacgtgctctcgggcaatccctccgctttggcggggtttgtataccttcatttttgctatggtgtaatggtaagatagtctgtaatttccctaccaacttatctttatttctatgtatttgtcgatagggtctctcattggaaaatgtgagagccatgccaaagagtaaagcgtccgcgacacgtgatatatcaagtgcggggaagataagaataaggtttataccattttaggcctagtgaaggggctagtggcttgataagacgtcagcagctgcattgagatgtggcattggcatattggaagaggaaagtcaccgcgaaagcctgagaaattttttgcactcgaaatggtgtcccacatattgcagctccaccaggaactgtggtctcacgagtcacaatgtaatcctataaagatcatcgagagtcgctgaactgaagacctggatagacaacaacaagacagagattccttatcttgattcccccgctgacaatcttacactatgggatctatcgagatcatagaacagcagtacgatgtccttatcatcggtgccggtctttcgggtatctgcgcactacacaacttccgaaagcgctttccatcgtggcgcgttggagttctggaggcagccgacaatgttgggggaacttggtattgcaaccgctaccctggagcacgagttgacaccgaatcactttcctacgcatattcgtgggacaaagacctcttgaacgaatggacctggggggagtctttctccacccagtcagaggtgctccgttatattgaacatgtctgcgacaagcacaacctttacaaaaatatccagcttaacactcgagttaaggaagccgtttggcaggaaaagaacaatacttggctgtttcgcgacgaagtcggcacccatcaccgaacccgtttcttcgtcagctgcatgggtttcctctcaaccccgacacttcccgccattccagatattgaaatgtttcaaggaaaggcattccatacctcccggtggcccaaagactttgacatgaagcgtgatctggccaacaagcgggtgggtgtcatcggcaccggcgcaacgggaatccaaataatcacagcgatctcaaaagaaccgagcatcagatcattgaatgttttccaacgcacggcaaactggtctgcgcccctacggaacgaggtgattaggcccgagcagatggagcagcaccgcaaaaactacggtgccgttttccaactctgcgccaaaacacccagctgcttcatgcaccaagccgacccgcggaagtccctggaagtatctgcagaagagcggttggagctttgggaagatatatatgcaaagcccggttttgccaaatggctaggcacattcagcgacacatataacaaccgtgaagcaaacaaactgtactccgattttatggccagcaaaattcgagccagaatacatgatcccgaggttgctgacagcatgattcccaaagatcatggcttcggcacacgacgtgtccctctcgagagtggatactttgaggcatttaaccagcctaatgtccaccttgttgatctcaagaaaacgccaattgagagagtcacgaagaatggtattgtcacatctgatggcaaagagcataaattggatgttttgatctatgcaacgggctttgacgccattaccggtgcattcagccccattgattggacagggagaaacggtcgccctcttctcggctttagcaacaccaagcaaggcgagcaagcaatttgggttgatcaccggccccgtacatacttgggcatgacggcttgcgatatgcctaacatgttcatggtcctgggtcctcaccaaccattcggcaatgctccccggactatcgagcacgccgtggaggttatttcagatctcttacaacactgcaaagacaacagctactcctatgtagagccgacgggagaagctgtgaatgcatggacggaacacgttgttgaatgcagtaaaggtgctttgtcaaacgaaatcgacagctggatgaccggggttaatacgaatgtgaaggggaagactgttagaagtgttgcgaggtacagtgggagtgccgtggagtatcgccgaagatgcgctgagtctaaggcagctggttggaaaggtttggcatttgctcaactgtcaagttccaagctttgatatagataaatacttatcaactatcaccattgaacgtattgtttacactgccccataagcataccacaatcagaacgaatcaacctcagtcagaccccaaactagacaataaactggcagaaggagcaaagaatgtcgtcccagtaagcggcttcgagaaatcaaggatacgatcatgcaggccaggaggatcgccaataaacatacgctccatcattctttcaatcacccaaagacgacgagtatagcctatgaagtaagtcccaaactcgccagaaccaggagatccaaatggcatattatcacgaagaatatcatgctcattcccatcttcatcttcaaccgtggtgagtgtcttgtgagagcgctgacccgacttggcatcatcgagctcaatattatctattttggtgcggccgataatcctttcctgctgttccgtcgagagatctttccatccaggtagatcgtgactgtacttctgtacgacgatatagctgccacccgcggcagctgtatcttcctctgcaaccagaacggaagccggaaccgccagtccaactggattagccgtaccgtccacaaatccaagaagatcccggacatcaaagtaacgaaaaccgacagtctcatcgatgacggagaccgagtcgccgagttggtccagtagctgccgctcgaattcaaagcagatatctctgcgctccgagcgaatgtggaaaagcaaatcaccgctggtcgagaccgcggtgtgtttttcgcctttgacctcacggaaagggtgcagctctgagggtcggggaaaccccgtgagacgatcccagatgtcacttccaatgccaacggtgcatgcaaattgggcgctgaggtcgcggatggatacatttttggccaggctgtccacgcctgccagtgtagagcgcacgttttcaatggcattggacttgttggtcacagagagaacaaggaaggtagcgaatttcgtgagcggggcgtctacacgctgaggagccattgggacacggtgggtgttcatatttgctttttgatatgacttggaattgtaacaggcagatatgtgttgtctgcggaatgaacgcccggtgaggctcgcctggttggtgaaatgccgttctttccagaatgaactcctggaagcagctcgaaaggtatttgaatgaccaaaccgagaaattgataattgaagacgaatgttgggaatattagagatgaccagtctcccggacttggtcatacttcagctgctgacagtctgtggtacggagtagacgaagctcctcatctggtgtgagtgcatcaactgattatattcaggaagaaatgattggacaaatcatgttctaaaaatattggagagcgaagcaagaaaccggtcgatgtgacattgtcggtggtgacatcaccagccggaccgcggggaaatattacgtgtgtctctattcgttcatgattttgtagtaacttgattcttgcagatgttattcctataaacaaatgcgaactcatcgctgcgtgtacccaccatccacgaataaagccgtcccagtaacaaaagaagcccgtccaccactcaagtaaacaacaccgtcggcgatctcctccggccgacccatacgctccattggaaccgcattagcaactttctcctgcatagccgcgaagatctggggcgacttggtcgtcaacggggtctcggtatacccaggacagatagcgttgatgcgcaacccatcctttgcataatcctccgaggcagtcctcgtcaaaccaataaccgcatgcttcgtcgcagtgtacgcagtcgacaacgcaatcccagcgacgccctgaatagacgagaagttgacaattgagccccgctgcagtggcctgccatcaatcgaagaccggataggctcctgcttcaacatgatcttggcagcagctcgcaaaacgaagaatgtacccgtgaggttgacgttcaagatacgctcccaatccgatgtctcgcagaatgcagctccgcctgcgtgcttcattgcgattccggctgcattgacgacgtagtcgagtcggccgaatgtcgtcgcgacttcttggacgacatggttgacgcggttctcatctgttacattggtggggtaggtgatgacccggcatggctttaatcctagtccgcgctgttgttcttcgatctcggctttcacagcctccagggcttcagggccgatgtcgagtagggcgattcccgaggctccatctctggcgaatgtctttgcacaggcgcggccaatgcccgaggctgcacctgtgataagggcaattccagatacatccatttagggtggtttgcggggcttaggatacttgattgatctgctggtgtgcgtagccggaagggtgacggtgggtaaatggaacagagcaactgaatattgatggtttatatagtttcccacggagagacttgaatagacagcgatgacagcccagtatctttctccaaaaagactactttgatgcatgtggggttgtcgcggagacttgcctaactcgcgtctgatgatagccgtgcaacctatgacaacgcatctcggacttgctttcctatactgtagggattatttagtgtaaagacacgtactgctgctgatacatacgttcagtgcggtggtgttgcagctggttgtcaccttggattgagagcggatttcatacaccaagtgctaacattcaatttaaaatttggtactagaattgatcaacgatcggtaattgttgaatcattttggccttatttaatcatgttctattgctctacgtatggggatatagatatccaagtttacagtaatagtcactgaccattgatgaacaagtttataggtttattgcccacggtatcatattataaatcaaaatatctgatgtatcggcatggagcctttcattaaatccaaccaagtgacactcttcccgttagcacaagtcttctcctgccaaattcgttgaatattggccaatgtttcagtgaagcaagacaagccactacggcgtgccgaattcacaaaccagttggagaatgatgcctgaaccaatggatcgtcggcctcacaggccgcaataaacgcaggccagataaatcctgccgagccatgtactacagtagagtccgtgttctcgcagcgtagtagatggtccaacacgaccacgaccttttgctgtagcaaggaagcatccacgtcgtagattcgacggtagaaatatattgccagtgcattttgcatggcattgagcatattgtctatgacttcgtggtcgaattcagattggatattctccaggctgggtagtggcagcttgttgatgtagtcttcgagagtcttcgcccggctgatgaactcttttaagctgatgcagttcgatgcatcctctctttctgccgcgtccttttccttccctaatcgaataacttgggatagaagaagaacccatggttcagggataccaaatatctccgggtatagggtgttagaccagaagccaggtctttcaagatgcagatcattctcgccttcctcttgcccacgcactctcatcatttcttggtccagattcttccaacccgataagcgaaatgacagactgtcgaggctgtagtttccaagcccgctggtttcaatggctgcgtgcacgtgatgacgctgtcttgagttcgctccacaaatgaagacactctcatggatgatacgttcaaatacatagcagtgatgtagtaatcgtacttttcgagactttttgcgcggaagtcctcttaaacgaatgaacttttcagcttcaacgaaataatactccgattcccttcggctccctgagaacatcgtcacttggaccatggtgagcaatgccatcaagattgacttgtatttggctactttcggaaaattgtaggcggtcataagcatcattttcgcatgttgctgggctttttgcttgtaaattatggccttctcgctccatgtttgggatcgagagactcccccaaggctgaatgcacttatggctaatgtcccgtagaaggcacatagactggcatcactcatgttatcaccaagaaccaagcccgcgaggcagctcttggtgtgaggtataaaaagaatgtgccagggggttttagagtgtcggaggggcgtcatcaggctaattacagccgaagcatagtgcttgagaaggaacacggcatcttggggcagggctttcgtggtacccgttgaagaagtaaaaagattaggtaatattggatgattgtaagactgatctggaagacatgatgtgggtaaatatccatggggtactggatcgtcttccacggaatcttgatctatcatggcgtctaaacataccagggaaggcggactgggaacatgctctggttgatcaaatgtgaagtgcgttaaggactgagaccaaggcgacagaagcatgtcggacgaattgctgaatagaaccacatcttccggagaactggactgtgtctcttcaaagtcgttcatagctggttcacgcggaattgtgtcttgaccttggtttgatctaaacgccccgaatggaccttggtggatctcgatttcctccgaagtagttgctctttcgcattcttcatcaatttgggatagaatatgatgggttttctttggaggagcgcttgagacaagccactgactcatgcgttctctttccttcactgtaaacaatggtcgacgaaaccggaccccatgattgcgtagtgagctctcaaaatcaaagaagataactttcttgtatcccccgcaagctaagccaaaatattgacacattgaacattctggacgtccttcgtcgcatttcacatgtctacttcgacactattgtgtaggttagatatgcattatcatgactcaatgagatcggcggacttactgtgacacaccctgtgaatgagcgcgtatgggtaatggcctcgtgtacaccttcttgaggtgaatctgccatctttcggtgtttgaacaaggaaagtgttgtacaggagtctgcgggggaagtggatcggtagatcgccgatagcggaaacctgcctgtttcgacggtgcgcggtcactttcctattaggttggactatctatgcagtagttgaaggtcggaatgtcgctgataatgtgtaattctccgtgtttccccgcccactgcattgggatattctcaatgggcttgccgatataatgaaaatgccctaaataaggctatcccacaacatccgtgttgattagttccctttcgctcacttcgtttgtttcagggcatatactttcgtgtctagtgacgacctggcctcttgctgtaacagtttctatttagcctagctgctaacataacatctcggtcattgatttatgtcttagtagattgaccaacattcagtcgatctttatcccgactttcccaaaatgcctttgctccgacatatactggtatgcacttttgagatcctcgagtctgaaggtcttttgatccatcacaggatgaatattatgcgcctcgactgcgcggttcatttgttcaaactgagcacgcgagcccactacaatgctttgaacagtgcacttggcgctaaatgactccagcagagtaggctggtccccggatttactaacgtaaccaatgcccgtaatcaggccggcgattttgatagccgccagggactatatagagatgttagtggattgttcggggtgtaattgaatcaaggactataatttcatacctgtctcagcgtacctggcccaccgacctcgagaatgtgagagacacccgccttttcaggtgtaaggcttttagcagtctttccccaatctgtcgtcgttttatagttgatgacatggtccgcaccaagctccttcaatcgtacggctttctcatcagatgaagtagtcgcgattacggtcgcgcccgcggcttttgcgaactaaagggaacatggaagtcagtttattcagcgggatcccttgagcagtcgtcgcaattggtttacctgaattccaaaaagactaactccaccagatccttgagtcaaaacaacatcaccaggtcgaagagggtgatcagcgctgccgtaaagtgcattccacgccgtgaggcccgcgcaagtcaaagtgctggcttctaggaagctgaggttcggcggcatagccaccaggccctcctcggagaatacaccgcgctgtcgaaaggtcccgtctaaaaggccaccaagcgcagttttcatggagcgctggtcaagggggccagcatggtggccctggttgaacagcgtaatcaccttatctccaacatgaaaacgagacactcgcgatccggttgcctccaccgtaccggctccatcagatcctggaataatattggcattggttgggtagcgatattcaccctgtacgagttaagtgggtaaaccccagtggtcgtagctctcgtcctggacttactgttgctataatcaagtcacggtaattaattgaagcggcgtggactaccagagcgctagggtcagtattactttcaatcaaccgtcggatggattgtcggcgtacatcggactaggacatcgtttgggcccaagtcgggaataggaacatttttgctgaaatggagaccgtcgaaccctgtctgtttttcgaccctccattcattcgtagtaagtgagcccatcttgcaggtgatgatttagcgagaacaacaaaataacatcttaaggactacattcagttatagatccatccacggacctctctggtgctttgtaatctgatcaatgacctcgttgctttgtaatagacgggtgaatacggcagtcgaacttggtccaatggggggcttacagctgatcgaatgttcaaattggcatactggcctgcgtttgacctccccgaagtcatacacaatgtatactcagactcttggatcgcgtgggcgaaggttacctgtcccaaacgtcaatgacgaagacaataatttatgattgcggtccgctaaaaaagaaacaatatacgtctttgagcaagatttgcttgatgctggaaacacatcgccagaagatatgactctggatgcactgcatattgcagcggagaaggacacatggcaatgatccaggtctgtttagagcgcacaaagatgaatgacatgatggtgtttgagggttccctccgctcaaaatgcacatagtccagtcgcttgataccgacaagctcaatgtcaactcacaggactccctccctgcgttgggctcctttgcatctggctggtatgaatggtcattttgctgctgtcatagcacttcttgatcacggagatgtagaccccaatgctgctgatgaagaagaatggactctggctttttcagtctttcgagagaaaccatctaagttgactttgccgaaggacagaccggtttttccacctggttgaatagatccagacaaatgggcacctaacgcaagtcggtaattcagtgaagctgtctacgcttgggtcacgatttgaagagagaagtccgtcatgcatgctggatgtttcagaaatgacgaggttattgattttctcattgccaatataagtctctcgaacatagaatcatgaattatgagatgtcccggcccaacattgtcaatatcgaacataacacaatgatgtagccaaggccttttgtaggatgctagaatgaaaagaaacaggtgtatgtcatcgatgcctggaaacaaccaagtcgggcagacgaaaaaaggaaaagccataacgcgccaggaccagccaggaagaaaagcgggtgaaagatagaaagaaacaacagtcaagaaatgctccaatcagggcgaaaacacatcgtagcccccccaacgcaagacagagttatgtgtcccatttacatctgtctcaatccctctgcaagacgccgcttgccgaactcccaggcgttcattagaccttgttccgtgagatcgatattcttcatattgggtgcatctgcagccggtgcgcggctgacacgcgaagcgatcatgaccgggtcagtctcgaggatgattccgtcgtcgatagtctcgtcaatggtcagggagaggaggtcgtagttctcaacgatagtgcgcttgtcggttgcgcccctgatgagcgatcctgttagcatcggtcgaattcctcgaattggaatcgaaacttgacatacttgaataagatccccagagcatctcgtagtgacagtacaacattgtagagcaggacctcgttctcgtcggcacttccaacaacgtaaagcatgacgtcgctctccatcttgaagaccacaatgcggttatcgtaaaggatgacatcgcttgcggacttgttggtcttctcaaggaggcccttctcgaaagaacgctgctccttcacggtagggtaggggttggcaccggggtaatcagtcgagtttggtgcagcgccggcgggggggtgtggtgccgagaagtactttgcgtagatgcgggacccatcgtcagcggacatgacgaggaccgcatttacggagaacagggagagggaaccgggcatggtgagttttgtggtgggagcaattggggaaatactgtccttgtgcttgttgatgctctcaaccgccaatctggccggaggcggagacgcactaatgttgttccgtcttcgagctctatactccgtacggatacagtgaccacagcacagcgtaagtgggaatgaatccacacttacggagtattcatctctgacatggtactaggactcagtcggcttcgggttacttgtttattaatcatttgctacattgtcggtacgataacgatatagttggcaatataaccaaccattcgttggccctaatactacaacggaatactagattaagttacacatctcaagattggggatatgacataaaatgagtggaaatacatcattgtgaaggatacatggggaataatatatatcaagataaagatcataatgtatgagactcctttcgaaaccacatcgcatggggaaacatcatgatcagatcgcgttaaaggaaacatgagaaatcagggaccttgaaatataggcaaaacatttcaagacatgaaattgcgttatgtgcatcataggggggtatgggtatgttaaaaatatggtcaaagaccaggttaagatcacatcaaatcatactgcccggagaacaaggcctactgcggcgctggttcatcgccggcgcgattcaaccacggaatccaactcgcgcggttcgccttcttacgtgccgcttcttcctcctccttgattctagcggtttcgctgacaaggcgcagagggcgcaacttgtcctgttgcatcaccgctccagtgtagttgttcatgccgccactggatcgaggagtgctagaggtggccccggtggaggctgtatctccgtggggatcgcttgtcacactgggggagctgctgcgaccaatccgctccggctgactggacatggaaggtgcacggctcatgctagatatatagcttgctgctccggagaacatgctctggcgggatccagggcccattgcagtcgggctaataggtccgccggagttgcgtccgccgcggtacatgtgaccaatgacactcgcggcacttgggtcgacttgttccgagcgactgcgacggtgggtggatgctctcacagactgcgtacggaagggaatgctgggcgcagtgttggggttctcattggggttgttctgtggggtttgcggtggaggcatcatgctggttggacgcgatcgaggttgggttgaagggcggggattctgaccaccaaccatcgacttcgctcgttgtatgagaccttgtgacgaatcatcatctttatccgaaggaataggggggagttccttttcactgcccccggtcttcgtggtggaagtttcatcatcctcgttccggtccagtatatgctcaaatccgtcatgcataagcagtctgctgataatacgctctatatagagcgtcagggctttgttctgatctttcagagccttgacctctccgtccggttgttgagcagcatcgctttcgggcgcctcatctacagattcaagctcatctgccaaggaccccagccctcctgccgactccttagtggggttggcatctcgcatgaaatcgcccttggcaaagtccccggtaagagtcttctcgctgagaagaagttgatagctttcattgtcctccatcaagcgagcattggccacgcgggcctcgagcaagtccttctctagttctcgctgacgaccgccaccgttctccatctcgacgagttttatctgtgattcggccagttcgaggcgtaatgactcgatgagtttgtctttctggaggagaagtgtagagttgttgcgggacgggctccgctcgatgtgcgaggagggcgcaaattgaccgtccacgtccggggaagatcgattgcggaagctcgctatagccgaggtcagtctctggatctcatcatctgcgattgtaggagcatgggtgtcttacaagatcgagaaacttggttacgatccccttctgcattcatgcgcatgtccttctgtgccatcgcgtccttcaaccgttgaatagtggcctgcatttcctcctcccgactagtctgctgttctttctcctgaagcatagcgttccgctccgcctcgtggttctgttccagatcccggatctgacgaccctggtcccgaatgtcactgttaagggcctcgatccgactgtctcgctcatgagcctggtcctccaacttggtttgttcactgatcgcttcatcgaggcgcatttgcagaacgccgagctgcttttggtattgttcagatgcagtttcggccttttggagttgttcccgcagttcctcgatgagggcggcattctgagcccgcgcctcttcttcggaggggtcattggaaactcgcggtacgtttgacatgctgaggttggaacggccaggttttcttgcagctgcgcgggctgatacgggagtcgaacctcttaaggaaggagaacggttaaggctagttgcgctgggtgagcgtgcgtgccctcgtgcggacccgttgttggagtgcggatctgcggttgatgatttgctggaactgccgggagttccaggctttcgaggcggtgctgacatgatgaaacgacccttgacagtccgctggtgaatgtataagaaaatgaaacgtatatagccccctattatacttcaattgggaaaaaggaaagaagatttcagggttgcaagtgtatttaggagcggtcaaaacctagtggacaccttgtggagagcgcttgtatgggaagattgaagggccaggaatgtggttgaaagctgtcacaggctgattgcgtgccacatggttgttcggaattggagattcatcgaaaacagcgtgaaagtcggaatgagaaaggaattgagaaaagtgctggttgcagaccttcgaatcaaagttgtcttggggaatgcggatcccttactgtatctaaaaatacgcaacggcttggaacaatacgagagagtaaggactttctggaagaggaaaagagaagtcacaaggggaaatttagtgaaataaggaggcgaagtcggttgtttttcttgttccaccgggtcgactggcctgctgagatggcgtgggctcatgaaagagcagtacaaaagggggatagatgcctgaggccgtgtatcggactaatgtaattccatctccacagcggaagttgacactttgctccactgcacctgcgcaccttgtccctacaacatatgctggaacagtcgagttcgagtacggagtatctgtatactacgttcggatgcatataatgctcgccaagaccctaggcgtcatctctcgggcaaccatatgagtcacttttgttatcgcaaagtttaacaacgtgcatgcaacggatcccaagttgggtatctatcacctgcacactcccaacccctagcggtcaggcaacgactcctgaaaatgtcaggtgacccacgatccaatgatgttgaactacctatttaggtaggttcaatgttcttatgtattcttaacgaattcaatcctggttctggcagggagggcaatatgagctgggtttccttgaatttccccgaggtttatgtcgccgacacaagagaagttgtgtcatctcaaaaaggaagttttcgccctcccataagagaattgcagtttacctcctgcccgtaggaatcaacagattaaatctagtcactgtagtttccccagcatcataaatctgaacgatacatatgtatagctatgacagctgggtggacgaaacctccaaatatagacatttgaatactttctaagccactgtgtcttcctgaacttgatcaacatcagcaccccatggcacgttccccgagaacgacttctggttctgattgcctggttggtctgcatcaaagtccaaacggtccgggatccttaaaccggctgggaaatggtatctcacaaaccatgtcgatactccatcccggtacagccaaggatcttctgtccgtcgctgccatgtttccagtctcgtcctcagatcatcgagtacagtagcatgttctgggtctttggcaagattgatcacctcatttggatcgttctccaaatcatacagctcttctggtgcgcggaaaaagtaatccttgagctttctctgcccgatcataacctcgctatctgatgagttccgaatatcttcccaagaaagagacccatagatgtcagccgcaaatggaaagtctaggcgccatgcgaggtttcggtggtatttgtatcgtcgatctcgaatgaacctcgtcggccagtagtttgtgacttcgtggaaagtatgtgagccgaatacttggttccactccgatttttgggcatttgttccgagtagcggaagcaacgagcgtccaagccgcttctttgctgggtcctctacgcccggatgtccaacatagtcaagaacggtggggaggatatcgacgtatgagaccatgtcagagttgactgctggctggacatttggatgcttgataataagaggcaaccgcacccctgcatcgaaaagagttgttttagagttgatgaaaggtgggccgttgtcgctgatgaagatgacaagagttgattcagtcaagccagcctctttgagagcattcaaaacaaaagcgatcccttggtccaggcgatgaattgagttatagtactcagccaactcgaaccggacacccggagagtcgttgataaaaggtggaatctcgaccagatcgctattgtaagagcccttcttgatccgggagtcgtattcttggtcgttgccaaatccacctcgtgtgcgatcgcggtgtggatcgtggaaaccaatcgtcaagaagaaaggcctctcatctgccagagactcttggaagaagtcattggcttgatcagcgatcacagccacatccctcgtttcactctccttggcgacctcccagggatagactgccaccggtccgacatggatctttcccagaatacctgtccgatatccgctctgattcagcagctgtggtgcagtttcgacatgatcaaacgtgacaaagtgatggcggtgactggcaagtccgtactggccgttctggtgggtgtatatatgacggagcggctgccactacaggacgcggtgcttgcaaaggcatattcaaatttggtaccttctgcggcgagatggtcgatattgggtgtcttgatagttggtgtcccgtaacaaccaagttgcttaccaagatcatcggcgaccatcaacagtacattctttctgcttgccatgatgacttggtagatcgagtgaaagctttctaggcagctttttggggggaggacatggagagagaaaaccacccgactcaaaatatatttgctattggtggatttactcggtttgaaactagcctcatcttcgctaggcttgctgtgagcgcgagctgacaccaagatgatgtgattgctagtttagacctagtgccgagattggatactatgcttaccaattcttggtcttattatgaaaagactaaccagttactgactagttagttatcagatatcgattcaaaatgttgtcatctgcagggctcattgctcatcgtactaacgtctcaagcaacccacttttttgatagaggtatactaaccagcctatttgacttgaaaataaatcacgcataaacgatattatccgattgaatcatttcagagaatttgcctgtcttgtcaatcgcgaatcgcggccgatactagtggatggaggaattatggcgtctttcattaagaatattgtgttgaacggactgaagaccgtatacagactaattgtatttgaaacagtgcagctactaaaaccaggcctctagctagaaataccacaagataggactaagagtgaaaagatattgagaacatatccaccacgatgaaattcaccagtttgcttctgctacccttgttgcgtatcaccgttggccaactcatcggccccgtgggtccaacaaccgacctttatgataagacagtcgaatgcaacatccttgattatggcgctgtagctgataacaagaccgacatatccactgcactagagacagttttctcggaatgtgttcgcaaacatccgggtagccgattaattgtacccgaaggagagtatttgatcgagcgaggtgtgactctcagcaatggcacaaattgggcattccagttggatggtctgatcacagctgcatatggcggcgactggaatatcgcgcgtgagttgatactccaagggtttgcaggcacagagattatcaatgcaaccatcaacggggagggtgattctaaatttttattagatgtgctcgtcattgtcaatggtgagttcacatctccagacatctttggagcccaatgttgacaaaacagctgtggatttcgagttctattcttccaatggcaaaggtgcctttcaaggacagggttatctctaccgaaatctcaacaagtaagttatagaccattttatgagatgttgtgaagcttatacataaattccagcacggatcgcccgcgcttggtgcgtttgatctctccgaccaacgcctcagtgcatgacttgattctagtcgacagccccaagtttcacattatcttggattttgccgtgaatgttgaagcctaccatttaaccatccggggaggaaacctgggcagttatgatggaattgatgccattggaacaaactattggattcacgacaatgaggtatgcgtctcaacccctggtcttcatctttcacctgaactaatgatcattctaggttaccaatcgggacgaatgtgtttccgtgaaaagtccttctcatcatgctttggttgagaacctggtgtgcaatcaagcaggctctggtatatccattggcagtctgaatgtatctgctgaaatatccaacatcgtcagtttcaacctgtcgatatcccatcaaatgctaatattgcagtaggaagcacgcaatatcagcattatccaaggcaacaacatagccttcatcaaaacatatcctggtggatccggctacgttacaaacatcactttttcgaatttccgctctctggggagtctttatggcttggatatcaaccaatactggcagaatacgtttgagcccgacaccggtgctgttacattgagtaacctggttttccggaatttctctggtaagtcattgacaaatgttagttctggcagtattcttacaaagtttgtcaggctctgttgccgatggagtgaagcgtcctccactttacctcatcgcgaatgatctcacatacgctactaatgtcactgtcgaagatttcaccgtgtggacagaacagggtacttcggttgtgaacaagatcagcaatatctttggcaatggggatgatagctacgggtcaaataatggtatcaagtctctcggtgaaggagaatcgccctcaccttataccagcacctacaccattacagcatctccaactgactggcaggcccccacaactcctacgtgggctgttcctagtacgggttatggaagtaagctctctctcggcttcttttgtgtttcttgtcctaccagataactaatttctctacagcggcatctcctattccggtctatactccagctcctctgtggcgcccaggtggtgtggattatgatttgcattactggggaagcttctaggtggtagcttatcgaatcgagtatgcgacgatttggacactctcatttgtttacggggtatgttctatagcgtcgcagtgatctttggtatgcgcgaggctgtataggtgttatctttagtcaatgcatgtagaagaagagaaaatcgattattcgtggcaaagaagacagattcttccaagatttgaatgatatctagtattattttctctaagtttgtaatgatcaacctcagtattggataggtcaaggaacgccgttatccctacctaacttagtacgtattttaacttcaatgcacaatcacaccgaagcatagaattaagaccccttcgcatggcgtcagtaaataaatattttgtagccagaactcgagtcggttaattaacaatgccgtgaggtagaggtccgatgaacaagaccgactcgggagggagtgccgatgttgacagtggcgttggaatcctcaattctgatagaaatccaaggcgctagatatatatgtacattattgcaagacaagattttccaccaatctgagcaaatttaattcaacttttccaccgctagttgcctggacttggcagagattgatgcaatcaggcgctatcatggcgcaaaaatatcggctaaatgtcaaggcttgttttcattcatcaacgacaactatctttgatcaccgagcatcatttagaccattatagcgtcctttccaaatcgctaggaggaattcactatctctccgttgggagttcctccgctggcgtaaatggcatcatgcatatacttgagcacgcattttgtaccttgcagtctgagtcggattgatattgttcttcatttaatctaatataaagtgttctatctcaatgtatatctttgaatccagtactctctgtctcgttcttgattttcgactcatgcgccaaagatagccatggcatcgacattttccaaagagcttccagcatcggattctgggcctcagaatgacgatcatcatcacaaagacggttctgtggtgacaacccttgctgagccagaggaacaacgcgagtccctgtcgctgttcgctgcacttttcttgcggaaacggaaagtcgacccagaatctattgcaacagttcggagtgtgttcgatgatcctctgttggcgcaattttaccaaccccgtccggactacgagaatattcacagattcgatccggaagaaagatggactcaccgtgaagaactctcagtacgccgcaagaccgattggaggattttcttgtggattcttgtcatgttttttggactcaatctcgatcgaggaaatctaggcaatgccgcggctgataacctgctcgacgatctgaagatcaccaccaacgactataacaacgcgcaaaacatgtatcgtatcggctttctcattgctgaggtaccgtctcagatgcttggaaagagattgggcccagaccgctggattccctttcagatcatcttgtggagtttagcatccggaggccagttctttatgcagaatcgcgctggcttcttcgcatgtcgcttcttcattggcctgttcatgggtggcttcatcccagatgcagtcctgtacctttcctacttctataccaagtctgagatgccattccgtcttgcattgttttggttcgttgattccatgtcaggtgttgtcgcctcattcatcgcctatggtgttctgcacatgcgcggtgtggacggccgcgaaggttggcgatggctgtttctcatcgaggccctcattagtctcgtgataggattcctcagtttcttattcttagtaccgggccctacccagacgaagacttggtggaatcctaagggatacttcaccgaaaaagaagaaaagatcattgtgaatcgggtgttgcgagatgatccgtccaagggcgacatgcacaatcgccaggctctttccctcagcatgttgtggcagagcttgatggactacgacttatggccgatttacatcattggaatgcttttcgaaatacccacagcgccaccgaaaacttatctgacgctttcactgaaatcgattggatttagcaccttccacaccaccttgttgacaattcctgtcactgttttcgcctccatcaatttggtgcttgtgaccgagttgaccgagcgtttgcaggaaatctccattgtcggtcttctcactcaggtctggaatctcccacttctcatcgtcctttacacatcagctggatcgctatcaagctggggtttgtatgcagctagtttcatactactgggctggcccaacccgcatgcagcacatgttggctggtgctcacgcctcagtaatactgtgcgaactcgaagcattagtgcggcgctctacaatgtgaccatccaactttctgggattgcatcctcgaatatctaccgcagtgatgataagccattgtaccgccgtggaaactcacaactcatcgctatcaacgtcactactatggttgcctatgttctggcaaaggtatactacgtgcgcaggaaccaatggaagaaagctcaatgggataaattgacaccagaggagaaggcaacttatctgagcaccactactgatcaaggaaataagcgattggacttccaattccatagttgagcactgtcccaaaatatctgctatatctctactttggatccgagctcattgagatgttgtcttcactatatatcatacatcaagaagaaaagaattgtgtcggatgcagaaagctcaccgtgcattatttcaagttcagctatgttcaaaatctacgtaaagattcctaatcagataaatacatcggagaaaggggcatagatctctcattctaagtaaacctccaattaaccaaagtatcgaatacacaggtgttcaatttcatggccttcaagacaatgtatttatcaggatgtacatcagtagggataagcttgtggatcaaaggtaggtcgagatctcaacattgtttttacttcttcttagctatacctaacaaaggactctgattgtatctttatgtcgagctggtatattttagcttcttgagcgagctacaggtaagagaacataaaataataatacatacagttctaccgcaaaagtctccgtacgacccatacccattacatatatatctccgtacggagacttttgcggaggaactatacaaccgagatgcatccaagagagcgggagtgctccaaatcagataaaagtggaccgaaacaggattagtggggaatcttgttgaccaatcaaaaatgtggagctgtagcctgggctacggcctgaggactaaggcattaaatagggttaaacccttttgccacagtgctgcttggaaatcaagacccgtgaccacagcgaaaccctctttctctttctccttccgaaccctcgacaaccaccgacaacctatacccagttcgcaggaagtgccatcaccacccttccaacactcaaaatggcccgccgtcccgcgagatgttaccgctactgcaagaacaaggtgcgtgccgattcgatttcgcgagctttgaagatttgtgcgggctaccttggtggtggggagtgtgcatcaatacatcgccaacgaccacctcaccatgaccggaatagcacatttattctcatgcgagatatgcgtggcactggttgtggaaatttttggggaaattttttcttttttttaaggtccgcagttttcgctgacatcagtcttcaacatccagccttaccctaagtcccggttcaaccgtggtgttcccgaccctaagattcgtatcttcgatcttggtcgtaagaaggccaacgtggatgacttccccatgtgcatccacttggtttccaacgagtacgagcagctgtcctccgaggctctcgaagccgcccgtatttgcgccaacaagtacgttactcgatctgctcccacatctttcgcctgacattcatggacatgttctcatataactttcaataggtaccttgtcaagatcgccggtaaggaaggtttccacctgcgcgtccgtgtgcaccccttccacgtcgtccgtatcaacaagatgttgtcttgcgctggtgccgatcgtctgcagaccggtatgcgtggtgccttcggtaagccccagggtctcgtcgcccgtgtgaacattggccagattattctgtccgtccgcactcgtgacgcccaccgtgctaccgctcttgaggccctccgccgttcccagtacaagttccccggtcgccaaaagatcattgtctccaagaactggggcttcacccccgtccgccgcgaggagtacctcgagctccgcgacgctggcaagctccgccaggacggtgcctacgttcagttcctccgtggtcacggtaccgttgaggagaacatgaagcgtttccccgttgcctacgagaatgtcgcttaattgttgatgggttgatcagaatatgaagttcagaacgaaaatacttgagtgttcttattgtctttaccttgcctcattcctcttgatatcaatctcgtgcaatcgcaatgatggagttcttccgggagtcttttcatttgctcgcctaattgcactcgtagatctgtttatctacctgggcagtaccgtaaactatgtattatttttgttgccagccctggagtgggcaacatttgcgctttcgatcatgcacggatcatgcgaggtgcagtcatctggtggatatcattcttatctagcaaaactagcaaaagtctagaccgaactccatagtgggctttgttcaacgatcagcaggaatatgggtcacgtcaccaagactgcagcatcacccccatcatacaacatgtcctgcgggctgtattgctgatttcgtggagtcttcattcatgcagctgaatgattaaacggtgggcaattcgagtgcaaaaattaaggacagaccaatgtgaggcctaggatttagcatatatattctaaggttagtattacgcacttgcattcaccgctatcattatggctagattaggtttacgttggcaattaggaattagatcaaggctcattcattgttccaatccattatatccatcctttcgaaaaaaaaaagatcgtttggacatcaaagtatatataacctccttactgaggcggcgacccaccacaacgtttcttgtgcaattctccagcaactaaagggaaacaattagcccaagtcttcaaacaattataatctcacagagaccgattggaaaaccaatagaagcaaaagcgcaatgtgtgaggagaatatacctgtcaagtctgccgcagtacaagaaaccttcaaacaggtaccgagcgtatccttgaacgctgggcttgggcaagtgcacttgtagtcaatagaggagagacagcctgctactgcagaggcttcgttgagacaacgaatctgtttgaaatacgaaaaggtggtcagtcttctgagtcaagtcatacatcctggtaagagacatacaaggcagggactggcatcatccagaggatcagcgacggtccatgacaggaacgcagccagcgggaagaaaatagtgagcttcatgttggattggtgcgaaacgtgggtttagtagtggtataatgatagaagatttggagtatgaaagtggaggagttgatgaacacaggacggccttgctcggtttatcaatagtcagtatatttgtgtagtgataggagagacagtacattcttcgtcaaatcggtatctcagcatcaacaaacccggtgcctgggtgatacgtggaatgggtttcattggaatgtgagaccagctaagcttctgaaactgtcaaggttacaacgagagataatcgattggataccacgtctatttcttatccagtcggtacatattagcatgttggcctatctgaatgtcgtaagcaaagttagatccaaacaatacggtcttgatttttgtgatgtgacttcttggacactagggagattcttttggaacggccacaatcctaaataggacaccactcttgattcgctagattatgagcggctttatttatgggaataccatcgactgtagagctccaatatcctctatccatgtgcatgcatgttgcttaatttctcggaacgacttacgacaggccccactactacatagctttggtttcagtactgatctgcttgttccttattcaacggtatgttgatttcagaatggcaggactgaaaacattccatttgatgtctctaggttcgggatattccggggacattccattcaattcgatatccccggagcaagaaatcgagacgtccagtggttcttagcaagttaaacaccaaccgaggggaattcccatcgaaagttaaccatttctgcagataaaccagcctattgctgatagtcccctgacatagtcctcgccggctctcgtaccttcagaagaaaatcagccgcagaccaatgcttagtgtatgggatgaggatacgggggtcttcagtcctgtcattatctactttcctcttttctttcatagacgaaagagctgaagtatataaatcatacgcgatggccgctattcccactattccaaattaggaccccgagagcaaataccgggctttgattggttagattacatacaccgccaaatatcccgccttgaccaaatacgtagagctatccaatctcctatatttctcttattatatgctatttttcctagatctatatgctgtacactgagaaattcaagtccaactcagaggtacaagtccacaaatttacgcggtcttcgggatctacatacctatcacaggtgagtggggtagatgtccagttttctgctgggcagtattaactcgcatggtcgcaaagctagtccacgggttccagccccgcatacgtcaccctcaaaaatcctttttctcctcacaaacacagctatgaagcagagattctcatctttagacgtcaaggtatcttcaaatatgtgtcgaagaagatatcacactaacaaccccaggtcatcacccaggaattggcgtcggagtgtgtcaacctccgagtgtccaacatctacgacctgtcctcggtacgctcaattcttttctctattaccatggaaggacggcgagctgattatttattcctattagcgtatatttcttttcaaactcgccaagccggaccatcgacgccaactcattattgactccggttttcgtactcatgtcactcaatattcgcggaccgcggcatccacaccatcgccctttgtgacccgtctccgaaagtacctgaagtctcgtcggattacaggcatcacccaaatcggaactgatcgcatcatcgacttctcttttagcgatggcgcataccatatcttccttgaattcttcgccggcggtaacattatcttgacggaccgcgaatacaacattattgctttctttcgccaagttgccgccggtgttggtcaggaagagataaaggccggactcaagtacactgtatctaataaacagaactatgatggggttccagacatcacagcgaatcgggttttgcaaacactggaaaaggcacaggggctttctgcccaagaggaaaatgcaccaaaaaagttcaagaaaaagggaacggatgttttgcgcaaggcattgtcgcaaggctttcctgaataccctcccttgcttctagaccacgtctttgcgatcaaggaattcgatactacaacgccactggatcaagtcttggggagcccagatctgttgcagactgtgaaagaagtgctagaggaagcgcgtcgaatttctaacagctttgattctggtggcagccatccaggctacattgttgcgaaagaagacacgcgacccatcccggaaggagagacatcgtcaaaggccccgggtctgctctacgaagacttccacccttttaaacctcgacagtttgaaaacaaaccaggaataaagatcttggagttcgagcgcttcaatgccacagtcgacgagtatttttcatcccttgaatctcagcgtctcgagtcacgattgacagagcgtgaagaagcagccaagaagaagctcgaatctgtgcgatcagaacacaagaagcggattgatgagctcaagaccgtgcaagaacttcacatccgtaaagcggatgctattcaggacaatgtttaccgagtccaggaggcaatggatgctgtcaatgggctcgtggctcagggaatggactggggtgaaattgcgcgcctgatcgagatggaacaagatcgcggcaatccagtggcgcaaaccattaagttgcccctcaaactgtacgaaaacacgatcactttacttcttggagaggccggtgacgatgaggatgaagacgaggagttttctagcagtgatgaatcagactccgactcagataacgaagcagaacaagagacaggtcgtgcggaacgagagtcaaatctattgaccattgacattgaccttagtctgagcccatgggcgaacgcatcgcagtattatgaccagaagaagcaagcttcggagaaggagcaaaggacaacgcagtcgtctacgaaggcactgaagagtcatgagaagaaggtgacgaccgacctgaagcgaggcttgaagaaagaaaagcaagttcttcgacaggctcggacgccattctggttcgagaaatttatctttttcatctcttcggagggttacttggtcatagggtatgtggctctattcaacaccgttttatgaaatctactaatcctagtagtgcacgtgatgctatgcagagcgaattgatctaccgtcgttacttgtctaagggcgatatatttgtgcacgctgacctcgaaggcgcgacgccaatcgtggtaaagaaccgagcgggcagtgcagacgcaccaatctctccaagcacactatctcaagccggcaacctttgcgttgctacttccactgcttgggattctaaggctgtcatgtctgcttggtgggcgcatgctcatcaggtatcgaaaatcgccgagaatggcagcggaatcatgcccacgggtgtctttcaaatcaagggagagaagaacttcttggccccatcgcagctggtacttggatttggtattatgtttcaagtcagtcaggaaagcgttcggaaccataagcagcgatttgaaacacctgacattccaaacgccgctataaatcctgcggatgagactgaggcttctgagccgaaggaaactctggagccagaagcctcggggcagacagaggccaccgaagaagctaccgaagacgcagagaaggaagatgcggaatctgaagaggaagacgaagatgagaaagccgctactagaaaccctctccaacgaggcaattccgagctctcggtctctcagccaactcaagaattggcgtctgagtctgagtctgagccggaagaagaaccgaaggatgagctggaaaaagaagtcggagaagttcagggagaagaagctacaccagcagcaggtcaaaattctgtgcccgagaaaagtgaagaacggaatttgaacaatcgagagcaacgtgcctcgggacaaggcaagcttcttggccaggaacaacctgcaccacgcatcacccccactcgcggtaagcgagcgaaggacaagcgcgctgctgccaagtatgctcatcaagacgatgatgagcgagaacttgctcttcggttggtgggtgccaataagggcaaagctgcaaaggcggccaaggcagctgaagctaaggaacagcgtgaacgagaggctgaggcgcagaggcaacgacgacgggcccagcacgagcgtgctgccgaagccgagcgcaaacgccaagcccagtttacagaaaatggaacggacgattacaacgaggagacagctgccgccgaggctgcggatctcacatggattccagcattggtgggtacaccaactatagacgaccaaataattgctgctattcctgtatgtgccccgtgggctgcccttggacgctacaaatacaaagtcaagctacagccgggctccgtgaagaaggggaaggccgtcaaggagatcgttggtcggtgggtgtccgagaccaccaccgggaaggtcaagaaggagcatgccgaagatgtcgggatctctcgtgtcgatgctgagcgtcttcgggaacgggaaggagagctcatcaagggctggaaggatacggagattatcaacactatggttgtgggcaaggtgcgcatcatgactgcaggagctggaagcggcggcggtggtgataagggcaagggcaaaggtggaaagggtggaggtgggggtggaggtggcagaggaggtggtaagggcaagaagaaatgattgggtcttgtgtatgtattaggagcacatatattagagcattgtattcaattcaaccaggatatacgagatatcctaattggtgttgagccgatgtatagttatcaagcctggtctctttatgactgctgatctgccacaaccccgcttcgacccgttcatatatacttatttcaacctcatatactatgaataactcccattccatatgtattgccaataatatcattggcgacgtgacgatgccccccgtgttcctgatgcgctgagtcatccgacgtcatgacccgaagcgattttcttgcgatcttccggctctcatcgcttctgacaagattgtgcagaatgacagccgaccgcgtacgctgagacgacctctcattctaccttcaatagaagagagtttgccccacgcaactagagccaggcctcttcaggcatcatttcgtccctgatctggtagtgtgtgtgcctgaatggtgcatcattgaggtcttctcaaacaccacgttgctttccactcgtgcttttgccggccactgtcagcgcagttgtgccagattcttgaccagtatgtctatacaaacgcgggttgtccccgtccaacggctcagccaagggcctggcgatttatctctggcggaatggtgggagaaggagcgcagccaaaaaacgcccgagtcccaggccatcgaagaagctgccaaacttctccggtctagtgacatccccgttgcctttcctaccgaaactgtatatggcctaggagccgatgccacgcgcagttcttctgtccagggaatctaccgagccaaacagcggccctcggacaacccgttgatcgttcatgtcgactcactggacatgcttgagcgtctgcttaatcctacctcccaaggcagccctaaatcaaccagaatgctgccaatggccctcccttcaatctacaagcctctgatcgacagattctggcccggcgcactgaccatcattttacctaacccatccgggtccatattggcgccagaggtcacctccaacctgaccacattcggcgtccgcatgccctcttctccactggcgcgtctactcatccacgtaacagatcgccccctcgccgcgccatctgccaatgcgtccactaaaccatcccccacaaccgcgcagcacgtataccacgatctcaaagaccgcattgagatgattctcgatggaggagcatccggcgttggtgttgaaagcaccgtggtggacgggttatgcgacccaccggcgattctgcgccccggcggcgtcggcattgatgaaatccggaaatgcgcagggtgggaaaatgtagcactcggctacaaagacggcacgctagacgtgaaagatgttccacgcgcaccgggcatgaagtaccgccactactcgccaaaagcacgagttgtactcttcgattcgacatccaacctagttggagtgatgaagcatgtccaaaaggacttgaaagacacagccattggcgcacacaaaattggtattatccgcacgcggaattggcagctcggcttggggctcgcttcagaagatgacatcgccaataccatgacccccgtgtcttctgccattgagaacattgtcagtgtcccgatccaaatccccgtgctggagaatggaaaacccagtagccgtacgaagatagcatacgattaccatcttggctcagatgcggtctccatcgcgcatggtctctttgccgccctgcgcgcgttggacgagcttaatgtcgatgtcatctacgtggaaggcgtgtcagattgcgagggtgatctggccgctgctgtcatgaacaggctacggaaggctgctggtgctgaaatgcgggtttagccctggagatggagtccgggtttttcttttcggggtttagatagaggcttgaaaagtgtgaatattagatttcaaatatattttaacatacaatattatatattattcacgtttcatgtgcacggagtgcacatgtattgaggattatgattggaacctcttggacttacccatttggtaaacatctgggtcctgttgatcttcatatgacgtgaaattcggagacctccggggcaaaagcttatcaatagacttaattttgggattagaaagtgatagaagacagctgtgtcacgaaaatgaagagccatgataacctgagactgcagcgggggagaaagcaaactcgtccggcgcttatacctcgtcccacattgacctagaaaattctcaaatccaaggaaacttactcactgcaacccgcaacaatgtgtcaatctcctttgcacgagttcctcaaaggcctccctaaatgtgagcaccacgtccatttggagggcacccttgagccagaactcatcttcgagctcgcggcgcgcaatggtatcaccttgccgaccgacccagtctatacctcggttgagacactcaagaaacgctatgagcacttcagtaacctggacgacttcctacacttctacttcgaaggcatggccgtcctccgcaaggaagaagacttcgccgacctagcgtgggcatacttccaaaaggcgcacgcagacggcgtccaccacgcagaggtctttttcgacccgcaggtacacgaaagccgcggtgtaccatacgacacaattgtcacaggcttctcgaaggggtgcaagcgcgccgagaccgagctcggcctaagcacaggattaatcctttgtttcgttcggcatctccccgtctcgtcagccgagaaagtctacgaggagttcctggctcacaaggactttgagtctggcattgtgagtggactcggttggtcttcttcagaagtcggcccgccgaaagacatgttccgcgagatctatgcgtcagccgcacagaaaaatatcccgctcacggcgcatgccggcgaggaaggtgatccgacttatatcagcacggcgcttgagcttggtgcccagcgtattgatcatggtatccggctggttgaagacgaagagttgatgcggcgtgttgcgcgtgagagtatcttacttaccgtctgcccattgtcaaatgtgcggctgcgctgtgtcacttctgtgaaggagctgcctattcggcggttcttggaggctggagtcaagttctcgattaacagcgacgatcctgcttattttggtggttatattcttgataactactgcgctgtgcaggaggctttccacctgagtgtgctcgagtggaggatcattgcagagaatagtgtccaggggagctgggttgaggattcgcgcaaggtggagatgctggccagtatcgaggcgcatgtcgaaaagtacacatctttgcataacatcgctgtataaattcggattgtcggtgtattggtttctgttcgagttgttggctgtggtgggcgtgagcgtgggcggtgcatctgataccctgtgtttcaacacttttataccatttttcaactgaagtatataataaccaggcgaatagcaagttaaatatttattctcattcctagcggagtaccttggaagacagtcgagagtaataatcactgatgccttgtaaatcaggcctcgcatggatccatatctggacagacgactcctcacttgcacttgttgtctgaccgtcggccctgcacaacagtaccttatgcccccaaacatcccccgtggtacctggaggctcacgaggtctattttacgacccctactacgatcccagataccatataccctgcggctcgcgtcgtgtttcgcaggaatcaacccaggaacaaccccgcagcaaagcgcacgactacttaatatcttcaaacgaagccacagacagagcaatatacactcaaaacacaaaatgtccacctccactccggaccgctacaagctcgtctttttcgtcccgactgccaacgtggagcactgtaaagaagccatcttcgccacaggtgcagggtcattcccaggtgggaaatacaccaagtgctgttttcaatctgttggcacaggccaatttctgcccaatgagggcgcagacccggcggtcggggctgtcggtgctttggaacggtgcgaagaggtcaaagttgagattatgtgtcttggtcggggcgttatgctgaatgcagtcgatgctttgatcctggtgcatccatatgaggaggttgcgtatgaggtttataagatggagaacgtctagttgcgcgactcaagatgtggttggtggaacacagcgtaataatgtgatgcgactgggaagatagttatctagttctgcaatgatcaatttcacaagtatatttcaaggaatttcgagtccaataaaacagttcgagagtatcgttgtctcaaaacatggaagttgtgttggctgtcttcgaagagcaattgtatgataacggattggtaaggcggtagtaatccctggatgctgatttgcccagggcccgccccgagtaaaacgcctcgtcaacttgacttctcctccaacctccaacctcatctccccccaattgaccctcacttatcgcccgtgatggcctctaaactcttctccgtcccgcgggtcggccgccagttggttcaccagctccccaaatctcaatacagagccttctccgccggttcgcaacggttcagcgaatccctttcggtggtgcgtatttcgttccacccctcttatgcttcaggcgccgattatgccgcagggttgaggaatcaaagactcatatactgactattgttgtctctaatagcatcgcaacaaacccaacaacaacccgaccctcccgttcaagttttccgagcagaacctcacactcgccgatgagatcctcaagcgctaccctccgcagtacaagaaggctgctgtcatgccactgcttgatcttggccagcgccaacacggctttaccagcatcagcgtcatgaacgaagtcgctcgcatgctcgagatgcccccaatgcgcgtttacgaggttgcgaccttctacaccatgtacaatcgcgagcctgttggcaagtactttgtgcagatctgcaccaccgtaagcacatgaaatcaacactatttcctgctattcctaattcgcaatcctccagaccccatgccagctcggcggctgcggtagtaccgccattgtcaaggccattaccgaacacctcgggatcagccccggccacaccaccgaggatggcctcttcacatacatcgaggtcgaatgcctgggcgcttgcgtcaacgctcccatggtccagattaacgatgactactacgaggatctgactccggagtccatcaagaacatcctgacagccctcaaggactctgccaccgcaaccggtgccgccactaagattcccaccccaggcccggtgagtggccgccatagctgtgagaacagcgccggcttgaccaacttgacggacgtgcctgtgtggcacccagagacgatgatgcgcaaggacagtgcattggacgccgcgcccaaacaatagaaaagcacaaagaagaagaattattaaaaagagctcttcattgccgtgggtcaattccggatggggaggatattataatggttgtgcttttttcgaatggacacgcaaaaccgccatagggcattgcggtcacactacggtcaacttggggaatgattagaggccactgcgcccttcgccctgaggcgccctgaatcataatcactcttgaggcgtccgaatttttttttctgtctacatcataccatgtacagtacgtttgttcctggttcttattgaagtgatcggagcccggatgcagatcaggcctagtcactgtggaatatcggcaggaccaaatcgcagattttttttccacttcctcttttacactagctattgagctcgtagatgggtgagtacgtgtgcaagatattgttggttcctgctagttttatgagaatttattgcattgcatggcatcatatcgagatatccatcctcgacctccgctggctgagttagggctagtatataaatttgtctttgtcaaaacgctcaactccctaccgggctatacgttgctcgtgtttatctagccgccgagctagtatatccaatcatgttttataacatgtgctctaatccacaacattctttcttggcagacggggcaataattcataattcatacagcaggtgagatttagatagactatctgtgcacaccattttgttgcacgatttcattacttttacatgagatgtatgcatgaaggaagcaaaccacccgtgtccaccttgtttaccacgagttcttaacatgggcaaaaaaaagcgccctcatgacagtcatagcaaccggcataaaatccaaccgcacaagtggcctcgaggccatcctactctggcatctcctccccttcgcatccgatgtcgtttggtaatacttcttcttcgggaaccaaaacgtggacaccttgacgctcaacgagtttgcttgattgagcgttctggaagatgttgacttcgtatgtgttcttcaccagcaaatgatagacatggacctcgcgctcctgtccgaatcgccgtgcacgtccgactgcctgggtcatgcctgcctcaaagtcatggtcagagggggcgaaatatggcgacaagaagataacgtggtttgcgcattggagattcctttaattggatcatattagtaatgtttctaacaagaataacggataatagcagagagaaatgacttacaatccagctgccatggagtttccgagattcaagatcaaagccttcggtctagaaggtggttgcgtcatgcccttttttagtttcggagcctcagtgaactcatcgattcccttcaagttagtctgtgtgaccatgcggtggtcgatgttcgcagcttttagggcattcgataccacaggtaacagatgattgatttgcacaaagatgaggacaagctcttcctctgggacattgcggacgatctcaactagcttgttgagcttggtgctctggatttcttggtcttcgctgacaaggatttcaccgggcacgatcttggattggacaatttggccgccgcatccaatgatagggcagggtttgcgtgatccggcggcaatacaatctttgcagaggacatgaccgcaggttttgaggacgttgacgtcttctttttcttgcaagtcgccattacatttttgacataaaagaattccaatggtttggatcctcactagatgttcgtagaatcggtattcccggtcaatctcgaggacctgtttcaagagagaggtgacatcagcggacaaggttttttcgacagcgatccaaaccgaattggaaaacgcatccacgggttttccatattctgtggctctaggaggacgctttccagtcgctttgttgccagtcttcgaattttgtatcttttggaatcgctgttggagcaaatcatcaattggctggtgttgttcggcgagtttccactcactgtatgagcggatgatgtcctctaagagctgtttgaatcttttgttgagttgcgcgtccccaaaatcaatcttggcgacgccattcagggccttttgccagttgttgggatcggtatttttcaattcgcgataccaaacaatcgctgcctgtcgagtgatcgagtccactttagtccagatctcagcggatttctttttgtcattctgcgagccttttcggcacttctcgaggttccatggaggttgtccgatttgatttgtgacgcaggacatgatgagagcctcttgggggacctggctcttagacaaaatggtgctcaaggggccaggaatccgtctcttattttccttgacagctcgcaacaatgtatcgtacgctgtcttttcagcaggcgactgttcggtgacgacaaaggttgtcttcaacgggatatgtgtgatgcgtgcgatgttctgacgcgcaaatcggtcaaggaagttttgggcatgttctcggcggttttggtaccaggcgttgctgtggggggcctggtaatattggaatgcctcaacagctgtgtggttcttccggatgtttcgtagtctgctgttctgcgtcggcttgtcgcaatcgccatcgtcgtccacaccaaggtgtaagccaaggtaacgcgcaacactcttaatgtcggcaaattcacgaagagctggcgttccagaaaggatccatttagagcgtgcctgcaatgagagcagagaagcctgtctttcctccccggcatatgtatattcgtcgattaccaaacggttgaagttgaaagcgtgaataaatgcggctttgacagtgcgccagtcgtgttcggcggtcttattgatatcaaaatctttgcggtcatctttcacggcagttgatttggctccaagtttctttccgtcatcggttacttcggtcagctctgtcaatgagtgtttttgtcgctttcctcttggaccttccactgacttcctactgtgcctccgcttgcgctggcccgcttcgggggactgtctcgcatcagatgcgccaaagtcctcgaaacccgagtcagactcagaatccaaattcctttcttctcctgcattgcattcatcacgaccatttttagcatcagcaaatgcctggccacgcaggcgccgagagggcacgtaagtaaaattggcctgtgtctcttgaactcggcgacgtctggcttccaattgccgaagcattgcctcagatccttgtgttttcaatatgtcaacagactcccgcaaggaagcacgagcattgtgaaaccagctatcgaaatttcgacctgttcctccgctcgattttgcgggagcttggggtgttccggtaaattgttgaagtcggctgtagtatgcatcgttcgccaggatactccatgacaaaatcacgatatctgcatcttcgacttcccggattgtgatcttgctgatcgaggatattgccaaaactttgtattttcctccaaggaacttcttggtctccgaaacccactgcttgaagacgttgctgggcacgatgatcagtgttgctttggttgaaatcagcccgttctcttcagggggtttgcagtcgctttcatactgcgtgtcaataagaccaagaataacagccgtcttgccgtatccaacttcgtcggctagcacgccaccgcgaacaacttttggcattgtcgctttgacttcggcacgccaaggcattaaggggaggatggattcttcaacttcctcttccatgaatggttccatctcttttgcttcttgtgtaatcatccagctcagtgatcgaagctgttcatcacgaagcttgaatttgaaattgggaggttgtggcgaaagactatcgttgtcgttgctcctcaaagtaaaaatgccaggggtttcttgactcatgtcgtacgcatgagggagaagtcgccagaaagatgttactccctcatggcttgcggtaccaaacaatttaccatgtgcctgatgggtcaaagcttgcacattgagagtgaaacgcagttcagcatctccatgttcgttgattcgtctgaagaccaaaaatggcgagggtcggtttttgatggcacgctcgtagacggcagcgtcctgcggattctcgtatgggatgattcgatctctgttgtcccggccccaaaggatactaggggtgggtgggttgcaggtgttgcaattgccatttgcatgatgtttgaggtctgaacaatccgggaggatgatttcgttccagtctttaaagtcggaccacgcagcaatcttcgggaacaaccaagcgagacctttcaattctctcatagagacctctggattccaggcttgccaatcggaatttgcgtcaggtaggttgagaatcgatgtcgttgctgacagcgaggtgagagttatacaagcatcatgacagttctggttttcaatcgagacttgcattccttgttgcaatgtgtggagggtaatctgctcggcaggacattggttcagatgtgccttgggggccttggcccatcgacgacagaaagctttcacatcttgcgaatccatggtgacatttaatgatgtccactttgaagataactcggcgatcgtcattctcacatcatatccaggaaggcggtcgtgttcaagagcgaatacaaaggcatcttcgtctgctggtccaatctttgctgggtcaaggaataggaaaattcggggtgcatgggcggtagcttttcttctgtacaatgcaccaagggctgttccacaatcagggaggaattggtacattcctcggacgtcgaaatccagagctgcgacgttttgatctgatccttcaacgaaaatactgtcccagacttttccatcaacaaatttagcggctttaataccacactccgattggaatgatcgaacttggtgtcctctgccagaaatctgaagtaaaattggggtgctaatgggtgaggaaatttcccatgtacccccgacaagcgacccagaagttggactcattctggcaattggcttggctagaacttcccggatgacgcttctcctactcgcggacttggggggcttcgcgtacaacagccactggaaggagtccggaccgatatcaaggtacaagctggaatgcgtgccgtcataaaccactcgccattttcttcctcgcttaatctcaaaaaatcgaaagacatcgtgcacagccgccttgacgcacataatgaagtcgggccaaaaccgggggaggttggtgatgtggtaaagggatctaaacatctcaaaccccaagtcggacagatcagacagcataagcttcatcggaacaagcgccttcaaattcgctatgaattcagacggcttttgtcgagaaagtggggaaacatgtagatatgaatgcgtggggtttccacgacaggatttgcaagcggtatgtccgcacagtgtgcaactataaattgaatcttggacccgagtctgtctctcgcaggagcagcacagaacgctgctcgctgccttgactttgagaacagcatggtcgataagaggtgtttggacgacttggaggttacttctcacaaggctatgggcctcgctgggtacgagaagggacttggcctccgcctcgccagagtttgttgaaaattcctcgccgtcgtcaagaatctcatgcacggctatcagaccagccagcatgattgcacacactaccgtactcgtcattgcatttcctgccatatccatcaaatcggcttgggtttctctcgtgagtaacattcgatcgaggggcagtccttgcaacgaaagagcctccgtgccagatacggggccgccgcgggttgtcacaaatggcatgcccttcggtgtcagacaccctgcgataccagaaccggcaaggctgtcattccctcgatcgacgccctgagataagtcaatccaacgcctgtgaagtgaattgttagtacaatattcctgaagtgaagattgagtagacttactccttgaagttcatgtcataatcttgaagcatcttcttcaggaaattcatatccacggtctcccacactctctccgactgtgtcttccagaaacgatgccaatagaagtccggtgtcttcagttcattgatcccgggaagggatcgagtgattggcctctcgctacctagttccagttcgtcacggtgccgttggtgacgaatctggtactgatcccagctggtttcgcttcgggactcaaggcgggctctcatctcgatgagctcgagtcggcgatcgtcatcactcagcaagaacaaccccaccggtgcactcgctggccgtttgaaacgatcagctagctcacgaacgcgttgagtgacaatttcaatgccactttgatccatggtgtctccaagtaggcccgctgcttccaagcggtgcttgtcaataaccaccatgtacccgcgctcgcgtgtctgcgggatgtagtaatgcttcgtgtcgacattgacacaaacggacatgtacctgagctcctcccacttccccttcatctgctcccagggcgcattccggacattctcctgaacgatcatgcggggtcgatatctcttcgcgtaccgcaagagaccgtcgaacgtagctcccgactcgccgccttgctgcagcgtcttctggcggttgttcaaaggagagaagtcgacacaggcagttccagcaactaatatgtcgaggttaccgggaattgcttctaatgacccgtaggcggtccgccttgaaaatcaaagtcagtattagagtcatgtcagaggaagatggatggggtacttacgcctcgtctcctccaagttcggtgatgtcccgaaagaggagaggggggcggaagtttcgctcaatgtacgactgcttgaatggaacaatctcacagctgaaagcgtgcaagatccgaagttgctgggcctccggcaaacctatcaaggtaaaattagcaattgttccatggtcatattccaagaagcaccaagcagagagtgagagaggtcagaccgagtcactggaatgaggtggaaatcattaccaggcaaaagcgatcatgccatggaattcagggcgaggttaaggcaaagttagggcaaggaaggaaacatgtgacttagaagtcgggacaaggcctcaaccatggaaccagctacaacatgaacctcaacacgaagacaacaaacgaccgactgggggaaatgggaaataaaagaaaaacgagatgctgcactgcctgcacttacccttctgtatcaattccagggctagaagcggggcttcggttcctgagcacattgtcgccactcgaagtggtcgactgccgagccgaatgaggacttgctcgagtccaatttccatggcctttgatgccatgtcagcaaaaatttctctcagcgtatgcagaggggggaggttattggctagataccgacccgaagggatcatgcgtccccgccgcagctcaggaatctcatcggccccggcactagactcctgatcatccattgccaaaccatcccccgactgctgctgagaaattccctttgacaccatgatgtgcgttgcaggggctgagaactttgaggtggtcgggatatcagataatactggcaaaccagacaagaagaaacacgctgaaaaaaagcctggaaaccgagacagttacagtaatgacctttattaccggttcaggcacgaagcaaactgcaaatatgcaaaatgatggatgaagcgatgatcgtctggaaaggtgaaagggaagacgactagaagaagaagaagaaccaaagagaaaacgagatagaaaaacactgcgcgacgccgagacaacgatcgagctacccccgttttatgcgacggtgggttctacccacgaccgcaccaggaattccggtagctctcgctcgactcagcacgacagcatgtgccggcgacctggatcaacctacgctgagaggtacacctgcgctaagatatactactgcaagacgataaccaagccaggctcgaactaattaggtaactgcatgtgacggcgactcatctccatgcggagttagagagacgctggcactgacgaatacatctattccacctaggcagtactctcaatggttgtgtgagggtagccttagcacgccgtttatcattggcctgttctgtactatcagaacattaaccgccattaaactaatgttaccgcaatccaaatggttcagtaattgatacggagatcaagccccaatcacagactaaagctaaaaagtgaactattgctgtctttgctgagtttatgtactatgctgataactacttgcttcttgaggatatagtgagaacggtctagacgttattaacggacattatttttcaagcagaagccaatgtatctcttgatggaagctataatatatagaccgacaagcaagagcttcatataacagtacataggtaccatcatttgtcggccaactttctgctttcttcggacgagatatgctagtttcccattgtgtcccttctttgatgtatcttaagtggcacagaatgagcctatggtataggcaatggagatgttatggcaaatggttataggcaccggagtgtcaatgagctcatacacttctattatactcaaatattgatatcaatgtcttctctgctgtaggtattgttatcgagattacggattatcatgccggtctcgaacgtgagtagtggttaattgatgggttggcagttatccaccgaacattgaaatcatgtgcacagatagaatttgctgaaacgtcactataagacggctgacagccattgcgagagaatgtctagataatattaattctatatttcaccatgcagcttaagcaatcccacgaatggtgaggtaaccatagaggctttctccgtcaccgacaaacgcgccaaacatattaacgggttaaggcatagataaacactccaaagggaaggcaagtttaacgttgattgtagaaacgaaggaccgaaagaatcaagatatcattctgttactattttgaaggaataccttgaaattgaccggtatgcaaatcaatgaggaaaaatgacaacccctttacgccacccattcgcctagtacagtggcataagaaaatgagaaaaaaaaataattggccatgtcatgctcgctctcgacgagcaagccacaaaatatctgaatcgaaatgcagtatcaagagagggtaataccctaccgcatgccaccctgcatcaattgctggcgtagcagcatgatctggcttctttccatgggaggcagagcatcaatagcagcctggggcatgctgaggacttgctgaaggagttcctcctggccgtgcatcggggcggcaggttgaatcgggggaggggcgaaaggagtgccggtgacaggcggtgtagagatctgaccaggaacaccatactgttgaaattgttgaggggttggctgttgagccacttgggggggctgggcggcctgttcgacgatagaaccaagcagctggtattcgaccagattcatgaggagtagagcctggaagacggcgtaggcgagctgaggcgcttggcgcagcagctcagtggcacgtgctgggtcggcaaccgcaagagatttcatttgtgtcaagacatcgagcaattgatttggtgggagggatgcgagagtatgggagatggcgttggggcagtcgatctgaggcgggagttccacgcctgggggtaaaggaggcagtggcgctgagcctgtgatttgttgctgctgcgtggtatcttggttcatcattggttgcgactgctgcgagtaatctgggggtacggaatctttctcgttgttgtgaggccaatcaacacggatcttgcggcccatgacttcgtgatcgttgaggttgcgcaccgccgaggcagcggcgtcggcgtctgcaaaatctgcgaatccatatcctttgggtttgccggtctcaggattcatcatcaaccggaactttgtaacggtaccggccgtgctgaggatgtctttgacttgttcctcggtgaggtctagagaacgatcagtatcgcgcaggttagacatgcagctacggttacatactgtagggaatattccccaggaacacgctcttcccagtccgatcgggcgccatgattgcgataggaaatgagatgtcagtgagaaagcgaagaagtcgaggcaagcaagaaacgctgattctgcccgactttcccacaccgcccgaaacctcacctcatccgctcaagcatcataccaagtcaatcttcatctatctccaatcttttccgcgcacttactcacatcatgtctcaaaatcaacgggaggcttgggagcgcctgcagcttatgctgtcgaagcgtaaggctggcttcggtggcggcatcccatccggtggtggccgcggaggcatgggactcgtcggaactctcgttctggccggtattggtacctatgtcgcgtcaaatgctctgtttaacggtatgttaaagtcatctgctcaaggaatcaaatttctaactagtttttagtggacggtggtcaccgtgctatcaagtactcgcgcttcggtggtgtccagaaggaaatctacaacgaaggtatgaaaacccacgagccagacacggagctctctctcacatttggatgaccttaggaacgcacttccaaattccttggttcgagaccccaattatctacgatgttcgtgcgaaacctcgcagcatcccttctctcaccggtacaaaggacttgcagatggtgaacatcacctgccgtgtcctatctagaccccgtgtcgatgctctgccccagatatatcgaactcttggacaagacttcgatgagcgggttctgccttcaatcgtcaacgaagtgctgaagagcgttgttgctcagttcaacgccagccagttgatcacacagcgtgagaacgttgctcgtctggtgcgggacaacctggctcgccgagctgcccgtttcaacattgctctagatgatgtgtctttgacagtatgtaccttctcccctacctctagcccaaacagcttctaacacgccatctccacacagcacttgaccttctcccccgagttcacagccgcggttgaggccaagcaggtcgcacagcaagacgctcagcgtgctgcattcatggtcgacaaggcccgccaagaaaagcaggccttcattgtccgcgcacagggtgaggcccgctccgccgagcttattggtgatgccatcaagaagagcaagagttacatcgagctccgacagatcgagaatgctcgccaaattgctcagatcctgcacgacagcggtggcaagaacaagctctacctggacagccaaggattgggcctcaatgtcaacgcccacagcgaagagggcaaataatttcattccgcttgatacttaatggcgctgcgtggagggatgtgaattattgtacaaatagctggattaccaagcatctgaatgcggtctcttctctattttcttttcaagtctccttgaaacatagtaattctttgcaagtagtgtagacctctaggtaggatgcggggacaaaggcggcgagacgattttttagattcggaggggcaccacttcggtagttcaacacacttgactaggattgactagcaagtatcatctttaattcgtgagtatcagttggaaaaaccagctcaacgagttttctttttcttttggaattactcttcgcaaaaccccgctaacagcccttagagcatgcccgaagtcaccgacgataccccagtgcacctcaccgaggtcgacatcgaccttgacgtgcaagagattctcctcgccgcttcgcagcatgaccagtccaagctgcgccgcctcctccgcacccagtctgtgctgccagatgctgcaaacgttaaagacatcgagactggcttcacacctctgcacgccgcaatcgccgcctgcgagcccgatacagaggcagtcggcatcaatggctcagactccaatccgaatgatctggatgccgagaccgtgaaatcagcagtggagactgtcaagtttctcctgcaagagggcgctatctggaacgatctagacgcgaacaacgagacacccggctgtatcgcgggccgcattggcgcttccgagctgtacgagctgatcgtcgacgcaggtgtccgcgcagagttgttgatgaaccgcctcgacgcgtacgaggagctatccgatgatgacgaagaggaagaggaaggcgaccccgaggccgagacagcaccggaactcgtcgatgcatccgccgaacccacgacagaaaccacaaccacaaccacaaccacaaccaccccggccaaccccgaagtatccaactcgcaatatcttgaatcgcgcctgaacatccaaaacgaccggatcctggacgcagaccagaacggcgtgatgatgcgctgggaaagcgacattatgcgcaagtccgcgatagcactgctcccgacgcccggcctgaaagtcctgaacatcggtcacgggatgggcattgtggacggattcttccaggaacgagggccggctgtgcatcacattgtcgaagcgcatgaggaggtcgttgcagagatgaaacgacgcgggtgggatactaagcccggtgttgttatccaccagggtcgctggcaggatattcttcctgaccttgtggcggctggggagactttcgatgctatctactacgatacctttgcggagtcatatagtgatttccgggacttcttctctgagcaggtcattggattgctggagcaggagggtcagtggggattctttaatggtatgggtgctgatcgccaaatctcatatgatgtctaccagaaggtggcggagatggatctcttcgaagctggctttgatgtgcagtgggaggagattgccgtgcccaagttagacggtgaatgggagggtgtacgccgggcttactgggttgtggatgattatagattgcccctgtgcaaattcatggattaagggagatcttggatgatttcatggaaaggatatttaaaaaaaggacattggatgtctatgactgaatacgacgctttaaaatgctacataatggctgaaaggaacaatgtacaaatgttatcacagctgaatcaaatccacctccgagaaatctggaggactgcgactgaagatcgtccgacatttgccgtctagcgcctggtactcattgctgatccatatatgtttgctaaaccgttgtgttcggtacacttcgtcatcactcacacccagatcatcacgcggaatccagatgacaggccgcttggcgcgaagggcctcgtgctggaaggcacgttgcaccagctggtcacgctcatcgggcgtaagatcctctaattcgtcgtgaataccggcaaagagggcttggccgactgtgctgggggctggtgcctgggcctcggtgtcttgggccatcttttcccgcatatcacgtagtgttggtgtggaggttgctgagttctgaccgaaaaatttagatttccggtttgatgagctggaggcccatgatggacgtttgtctccaagcttgggtgctgacaagatatccgagttttgtcgcatctggtttgggaaattggtctccagaggtttcagctcgatgtcttcttgcatctcctttatctcctttccgtgccggcgctcttcttgttcacgcttggcgagggagccttcgatatcaccatcctcgtcatcgtcatcgtcaagagcgagaccgaggcgagcgtgctgagcacgacgaaactcttcatcacgtcgaacagcatcatcttccaaggtaacgggcagataccggatcagtggattgaacgcatcgttgagaagaatttggtaaccggccgtcaaaactagaacaacaatcatgcaaatagcctgtcccttgcaggcgacatcgtcatccgcgttccgaaccaagaagaacaagccgattaggcagacttccataacgtagattcccgtgaatagctgattaatagctcgaggaaaaagaaggccaccggtgtcaaatcgaaacttagtcacatagagtgtgttgtagcgatagacgaaccagaaaaggccgaaggtgaggatgttgaaaattagaatcagaggtgcgatcacacagtagatcaaaccttggagaatgttaatcaacggattgtatcaaaaaagacaagacgacttaccaatagaggctagggtggtatagacagggaagaatgtaccccattgcatctgattgaggtttgttgttcgtgcccacttcttccgggcagtagagtccaaaattggagctagaatgaaccagctcaccaggccaaagatttgtacaagggcgccagcgctcacagacatggcttgtagaatcatgtaagagaagaagtagttactagacttcgggatgttcactgctaggagttgtggccagctggttacatcagtgacattctcaatgatcgtcgagaaactggaagcgatggtgacaaccaagaacaattgcacaaagaggaatgcaaaataatagttctggacagtgagctcgatggacatgccggtgaagaggccttgcgtgcggctcaaaaagcgaaggatgagagggagcagcgccatcagaatagctaaacacagcgcaggaagaataccctggatggcagaaatgaaccagtctggaagcttgccaagccaggcaagccatggaaatgcaccctccagatatgccaattgtgatagtagtccggtgaaggcgacggggaacgcccatccaacgaccattgcgcaaactagtgtgatgatgccgaaggaacgcaggtaccgttcccaccacttgatcgacatattatcccaaatcacatcatcgggagatatttccacgactcggggtgccatctgcttggggagatggtgactgacagcttgacaggccatgtgggcagcgacttggtgattgaactggatgaaggccgagttcattaaagggaacccctcggggtgctgctgatcgacttcgatctccagattcagacgagcgagctcctttcgacaataatcgatggtgtcaaccttttcccctagaagccagatcgaaggcatccaactccagccaaatatgggtagacgcatggtatctcggtccttcggccggatgtattctttccacagcggctctccgtagtcttcattttcgaaattttcgttataggcgatagggtatctttccccttctatttcgtctccctcctttcgagcatgctcgtgtttttcgttctcggatttctcgaagtcacgataggtggcatgagttgcaggcgtttcgggtgcagtcagtggatattggtcagcctcgcgtacaccctgcgatcttgtattagatgacattcgtctccagaatggtggcttcggcggatcgctgcacatggtggcatcctggtctgtattctgtcctggatccggtcctatgggcttccctaagttcaaactcaagtgctgacttcgccggagccccacgggtttggcgggttttgtatcagattggctgccagaggcaagaagacctgggactggaggggtgtttgcacgaggcggaagggtgtctggtgttgcagaatgaccgggacctgagggggtatttgaacgaggcggaatgatgttatctgtagttgcaacgaagcccccagttcgagataacggtttcttgaagcctccaagcactgttttgcccagtttccctaccccttggccaaccgccccggcggcggcaagggcagggtcaaacattcgaggtccgtcctccgaccgtttctcttggggttttctgtggagcatttcttgtactgtatgggcctgatgaggattaccagagctgataccaggacccatagccatttgagatgcccgtttttcagccgtcttttgctcttttttctctgcacttgattgactctcgccggccttctttgcctccgccttggcctttttgagctgtgcctttttgcattttgcaatcaattctgtctcggcgctttcaagcttgagagcaagatggtttcgtgctttcactttctcgttcaagtcgtcgaagttgcggttgagccaaatgtttcgcacacctccagggaaaacatcgaaaagcctgtcaagggcatccatggtgagccaatcaggtggaatagaagtaacgagcacagtggtagcagaagcacggagtcgatgctggggagacgtcaagtaggcctgtcgcaggcgaatgtaattccgaagttcatcaaaaaacacagcacagacatagataatggcaatcacggccattaccaaatgagcccaataccgactcgtgtgctcaggggttacgttaccccatgccaactggtccagaccagtgacggaatatctagtgcctgaggtaccattttcgtatgtctggcccttgccaccagcacggtttattggaagtagaacaggtaatatcacgaggcccagaggaaggaagatcttcaaaagcatgcgcagatagcgcaggaagaagtatgcatcaagcccacatttctggatgaattccgagctggatgtacgaaagactgggacaatccaatggaagaggcctggcggagatggggttgtgcgttctctatctggtaccagataggttcgcggttgactggatatcaatttcggtcagtccaacgtccacgttctcctttccagtggggtttcaggggacttactatatacggcttagtttaccttttagtaacagaaagaggagaaattcaacgacgaaaacgacaatggccgtcgccagcgacgccaggaaggtcgagattgacacaccttcggcggttcggccgtggccgccagtgtgttccagcgcctcctccaagcccgaagtcatgacgatcagctcgggtattgccgagggaaatggggactaggacgctaataggggtatcgaagaagatgtcacggcaagaagcatcacgatatgtcgttgtatgcactgatggatgtcgaaagtaatcgcctgtagattgaggggttgaataagaaggagctctctgataagagaagaaaaatcacaaagagaaacccacttgcgcagacctagggcgccaacctgatcagctgtgggggacgagagccaataacgtcgaatttggtctttgagtaatatcttggtttatgaggtgagtggcgcgaggactgagctggcggtatgatatcaagaaattaagacgttgacgaacagggatgattggagggatcgtgggagcgccgatcgaggatacaatgacatcaggcgctaagtgaaacagcccaaagaagtcacggcagctttagatagattctagtggaaggagaacaaagattgctttgtgtaaccgagcgcctcggaatttgatctatatttataacaaggaatagctccttttttcccaactatgacaacgttgatactgaataacattgcgagacccctactacggtagtattgaagcttttagtggggagaaaaaaagggaaagagcggtgattggcccctgagtcgaaggtccactgatgtggcagtgcatttatgtaattcgcaaagtccaccagccacagggtcaggaactccacgtggctggcgggcaaannnnnnnnnnnnnnnnnnnnnnnnnnnnnnnnnnnnnnnnnnnnnnnnnnnnnnnnnnnnnnnnnnnnnnnnnnnnnnnnnnnnnnnnnnnnnnnnnnnnnnnnnnnnnnnnnnnnnnnnnnnnnnnnnnnnnnnnnnnnnnnnnnnnnnnnnnnnnnnnnnnnnnnnnnnnnnnnnnnnnnnnnnnnnnnnnnnnnnnnnnnnnnnnnnnnnnnnnnnnnnnnnnnnnnnnnnnnnnnnnnnnnnnnnnnnnnnnnnnnnnnnnnnnnnnnnnnnnnnnnnnnnnnnnnnnnnnnnnnnnnnnnnnnnnnnnnnnnnnnnnnnnnnnnnnnccccggccacagggtcaggaactccatgtggctggcgttcaaacacgtcggccgaaaggggaaaccacttaacgcgtcggtcgcgtccacggtggcagaaaccgcgttccgcccacagctttttgctctccctttcttcacttgtatcccatagaccaccaacccacctgatcatcgtctggtatcagcacaataattcatatccaccatgtcgtcaccaacacaaagacggagtggtcgctcctctaaaaattcaacttcatcgcctagttcttcgtcccgacaggagcctcctagcagtccgacttttcaagcaaccccccgtgcctcgagacgtccattggctgggggagccgcaccctcttcgtcccccatttttttccaatcatccccgacgaagggaaataacaatgccgagactccagatgaacgcatggccgatgccagctcaacggtagacgatggcgacagaaccccgcggggcaaccccggtgtgagaggtacgaatttggttgtatcagagcagcaccttttgttttcttttccaatattgatccctaaccgcctattagattcttctcctattcattatattccaagttctagcccaactcgaggcttcggtcgatctgatatccgatccgacatccgctccgatgcattgagcagcgccagcagcggattatttgtgtcaccgggaggccagggccgacggggaggtcctcgtcgcagcgatttgcattctgggggctttgggtctacttccggtcgccgtaaccgtgtgttcgttgacgccaatggaatgcccacaggtgatacaatgcctcgctctgatgccactttctcgaatatcaaccctggcacctctgaagctgaagccatcgccggaaattccactcgtgtgatctggggcaccaatatctcgatcatagattcaatgtcggcgttcaagaacttcctgtataatttcgccacaaaataccgcctctgggctgacggtgccaccgaggacgaaaccagactactgggagaattagcggaaagacatgagtgcatcaccatgtgtaacaacatgcgacgactcggtgtgaacacattcaatctcgatgctgctaatttgaagtcatacccattaacccgcaagttgtggcaccaactttccgcatatccgcaagaaatcatccctcttatggatcaagctttgaaggatgtcatggtcgatcttgccctcaaggaaatggacgttcttcggtcagagagccaacgcgctgctcagcctcgtgaccgacgtggtcagcccatcctcacttcggacaatgcgattccgactgtcgatgtgccggatttagttggtgaagtggaggcgatgaccttcaaggttctccccttcggtttggatcaaaccgtgaacatgcgtgatctcgacccagccgatatggacaaactgatcagcatcaagggcttggtcattcgtgctactcccatcatccccgatatgagagaagcgttcttccggtgcagcgcttgcagctatggtgtgcaggtcgacattgatcgtggcagaatcgccgagccaacggtctgccctcgagacggttgcaaagaaaagaactcaatgcagctccttcacaaccgttgcaccttcggtgacaagcaagtcatcaagctccaggaaaccccagacaacattcctgacggtcagactcctcactcggtgtctttgtgtgtctatgatgagctagttgatgtttgcaaggccggtgaccgtgtggaggtgaccggtattttccggtgcagtcccatgcgtgtcagtgctcgtcagcgctcgcagaagtcactcttcaagacgtacatcgatgttcttcatgtgcagaaatttgaccgtaagaagatgggcattgacatgtccacagtcgggcaagaaatgtctgagcaggcggcagaggcagatcaggcgcgcaaaatttcagccgaagaagaagagaagatcaagcggaccgcctctcgtcccgacatctacgacctattgtctcgttccctggctcccagcatctacgagatggacgatgtgaagaagggcatcttgctacagatgtttggaggcactaacaagaccttccacaagggaggtaatccacgctaccgtggtgacatcaacgttcttctgtgtggtgacccctcgacctccaagtctcaactactgcgctatgttcacaaaatcgctccgcgcggtgtctataccagtggtaagggttcgtcagctgttggtttaactgcctacgtgacccgcgacccggacactcgccagatggttcttgaatccggtgccttggttctgtccgatggtggtgtttgctgtattgatgagttcgacaagatgaacgattctacacgatctgtccttcacgaagtcatggaacagcagaccatctctatcgctaaggcgggtattattactacgctgaacgcccgaacatccatcctggcctctgccaaccccatcggcagtaggtacaattctaaactgtctgttccgcagaacattgatctgccacctactctgctctctcgtttcgacctggtatacctggtccttgaccgtgttgacgagacggaagatcgtcgcctggccaagcatttggtcggcatgtatctagaggataaccccgagaatgccagctcacaggagattctggtaagtgccatttccccggatgatcaattcgcgagatttctaaccgttctctctagcctatcgaattccttacagcctacattacatacgccaagaccaattgccaccctgtgatcacccccgctgccggtgctgcactcaccgaggcctacgtggctatgcgccagctaggtgatgacatccgcgcccaagagcgccgtatcactgccaccactcgacagctggagtcgatgatccgactttccgaggcgcacgcacgcatgcgtctgtcgcccgaagtcaccgtcggcgatgttgaagaatccgtgcgtctcatccgctccgccatcaagcaggccgccaccgattcccgaaccggtctcatcgacatgggccttctgaccgaaggcagcagcgcctctgaccgtcgtcttcgcgacgacctgaagaaggcggtgctgtcccgccttgatgaacgtggcggtgtgagtggtggtgcggtccgctggaccgacctgtatcgcgatgtgagcgagcagagcgacctcagactcgaccacaaccagttcggtgatgcgctgcgctcactggaggcggagggctccgtgaatattttcggtgaaggtgctcgtcgcagtatccgccgggcggccatgagcatgtcctaggtggctgcgatgataccatgatgtgatgatagattaggctgcatgtcgtccttgagggtgttctggtgttggtgtttcaatgggtaatgatataggattcggccccggaactgttgtatatggtagattgatcaataataatatttttccaatctcatgagttccccaaggttggctttgctagagaccaagacatgtggaaaggtgagaaatcacatgcatctggctagacccaacaagcacaaagcgggtgtggggctcgatcatcttgcagatggccctgtccatctgcaacgagcattgaaaaagaaattgaaaagcacgtttaatattggactgtgtaggttctagttctatagattgtgtgtgatataataacagggccttggaatggccctagacaatagaacaatcctgcgcagtgagagatcaagagaggtcaacagagagaaagacgaggaagacaccacgtgcgcccatgactggccggattgttcacgtcaccaaggggggtctgtattgcggatacagcgttaccataccataattaccagaagtacatctcgattgccacgatcgtgctctttataaccaccagtatagcaagttgatgcttattttaaactcactacggttaaataggatactccaatgccattcagctattcaccatgttgagctccgtttaaacgattgataccatattctatcgcctcgactattaccacacccacttggccacgatggggccgtcacccgctagtcatcggactagccgagttcgggggtccattataacctcttttgactttctgtcttcggataagctgaactctccgaatttggcctctccctgcctccctcacaccttttttctttcttctttctccttctctttcttcttcccgtcatgagcttgggataaacctagactccctcacatttctccttgcccaccatgaggtatcgaattccctgtctcgctgtcttccagccaattccactccccgcgcatttatactgactcaattgtctcataggttcggcgaatacctccgttcttccatgataaaggaattctatccttactacattgcctatgacgatctcaagaaagctctgaagaccgatttcgtcgacgagccaacgtccgataacaccaagcccgcccgcaaagaatggaccgaggacgatgagacaaactttgtttccttgctcgagagtgaactagagaaggttttcttgttccagaagcgcaagagcgaggagattgttgcccgcattcaagaaagcgagctcgcggtgaacgatgtcgtctcccgtttggacagctcggccgattcccgtcgccagagtattcgagcttctcgccccgcgcccaccgatgcggatttcttgatgcttgagcaggtactcagtgatatcattgcggatgttcatgacttggccaaatttactcaattgaactacacgggtttccagaagatcatcaagaagcatgacgtaggttttccttccaggtcgcccctatcaattcgctaacaattgcacagaaagaaacacaatggtacctcaagccagtttttgcgacacgtctcaaggccaagcctttcttcaaggacaactacgacgccttcgtgattaaactatccaagctgtatgacctcgtccggaccaagggtaacccggtcaaaggtgattcgtctgctggtggtactcaacagaactttgtgcgtcagaccaccaagtattgggtgcaccgggataatattacggagttgaagctggtgatcttgaagcacctgccggtgttagtcttcaatgccagcaaggagttcgaggagaaggacacggccatctcctctatctactttgacaacacggacacttgggaactgtaccagggtcgtctgaagaaaacagaaggcgctgaggcaattcgactgcgttggtacggtgggatggaaagtgaccagattttcgtggagcgaaaaacccatcgcgaggactggacgggagaaaaatccgtcaaggcgcgcttcgtactcaaggagaagtacgtcaatgcctatctcgacggccggatgacggttgagcggatcttcgacaagatgcgcagggagggtaagaagagcgcgtcggagattgatgatttggagcaactagctcgcgagattcagtaccgcgtcattacccgccgcttggtgcctgtcacccgtacattttatcaccgtactgcattccagctgccaggtgatgcccgtgttcggatctctctcgacacggaactgaccatgatccgagaggataatatggacggccgtcaacggtctgggaagaactggcgccgtatggatatcggagtcgacttcccattctcccagctgcctcctgaggatatcgaccggttcccctatgccgtactagaggtgaaactgcaaacccaggcaggccaggaacctccccagtggattcgggatttgactgctagtcacttggttgaggcagtcccgaaattcagcaagttcatccacggaacagcgaccatgttccctactcgtatccacctacttccattctggttcccacaaatggatgtagatatccgcaagcctgcgactcgtcaattcggtatccacagaccgctggcgagtacctcaatatctgccaatgatgaagattcggatgatgacgaaacgccgagtgcgcaagagacgcccccgaacgaacacgccaccgagcatcaaaacggattgtttgagaccaatggcaacgaactagatatcgaagaacgtatcgccgctcagcccttgcccggtgacgaagactacccattgtacgactcggatgacgaatctgtatactccgatgaactcgaagaagctcgtcgtgtaggaggggcgtactacgcgcagaaattggccaaacattatctctctcgggctggtcacgctgtcgcacagggtcttatggcgttaatcccccgcccccgtccaacatccctgcctccccccgaacagcgtggcatcgctgtcttgagtaaccaccgacgcaccctacagcgattccaggctcccccgggtaaacgtaagtcggctcaatgcatcttgtgcatcaattccccagactaacacacttcgcaaaaaattaggcatcttcgttcccatccgcgtggaaccaaaggtctacttcgctgccgagcgaaccttcctctcctggttagaattttccatcatcctcggtggtatcgccgcaaccctcctgaacttcggcaccgatttcgcgaccctcatctcctcctgggcgttcaccatcctcgctgcgggtgccctcatctacagtcttttcctgtacatctggcgcgtcgacaagatccgcaagcgccgtgacgtcaaacgcgtctactatgagcgctggggtccgacagtcgtcagcatcggactggtcgtaatcattttagttaactttgcgctgcgcgtgcgggaaggcgggtttatggctgcgccgggatcggaaggcgagcctcagcacggcgggcatggggaactgtagaactcttggtttgtttggaaaagaagaacttaatcgttctctttgttttattgggttgaccaccttctttactgctcattggctaggcgcctcttacgtttgtatctactggtggcttcgggctggggcgttgggagattgtaaatcatgtacaaatcgcatacataccattgcaaatagtgtgagaatggcactcgattaccgatttctttgctttcgttttgtagatgttgtaaagtacaaattccagggcctgtatctcataagcgagtgacaacccagaacgcgtccatgaatcagcaatattactaaggataggatatatcatcttcacaataagctgtaggctgagaaggtgagttcagaaagacatcttcgaacaggttcccgaatggaaacgagaaaggaaacgccatgcccatgccgtcttgcgcaacttgatcaaataagcctgcagtggggttgatactaccagggttgctttcgttatcaagttgactcgcaccatttcccatcgaggatcctgttgctgaatgctctgctacccttgcgccatcttgtgtctgcccacctgcagagtgtcgcctaagcagggattcgtaaattggatagaaggctgcaagtaccgggaaccgatcttgcaacttgtcaagtatcagcatgcataactgggcgcgatggtgtgaaatccatcggacaccagtatcccctctgtgtatgttgacaatatagattgagagcacagacagcacgggtgcaactctgcaaaggctttagcaaaaccgccccggatcgattgggggtactttattatggaggcgacgtacatgctagctgcggctgcatagagaagatcacttgccatgagtatttctagcatgttgtagatctccgcacatatctcgaatgtcggagtgcctggtccggtattgagagaaaaccttgggttgctccgatgcaaaagtagccggtattccctatagattcagaatcagaatggagatattttgaagagccatttgaaagtcaacttactggtataatatatgagtcaatatagcccacttgctgctacttggcgacaacgacttgaattccggggaaagggatgaagagcacaacgagatttgctctaaacagatatcttgtgaatggccactatcttcgtcaaatttgatagtgaagaagcgatccactgtaatatatattagcaaggaaatacattcaggaatatgatatgatgatggatgttgaacctgtccgagctagttgcacagcatttatcacaaaggtatttgcctcatcggggtatcccacttgagacccactggcttggtcaaaatctgcttccgacagaggggggacattgcaaagtcttccttgcacgtgtgggggacgatcgagaagcatagacagatttatgtccatggcctagtttagaatgtcagaccgtgatagagctggggctttgttgagcaataaccgacatataccatccaccataatcttcgccataattttcgttctttctcttcgagacggttatatgactttctggaatactgatcagccgcccttggctcacattggaggggtaagtagactcacattcgatgcagtcctaaagcctgcgccattcccacagagataccaacccagtaccaagggtctttgtgttctagaagaccattccaccaatagcccataagaaatgttgattgaatcgtcgctatcgcatcggtttcatatccagcatcgtacagagatttggctctctggtaaaaagttaggcttgcagcgtatcgggacacaaatccggcaccagcaatgacggaatccgaacaatttatagtggcagcgaggtagatagcattcaagagcaagtgtgaagatttgccttcctcgagagtgacaagaaatcttgacttatcaagaataggtgcagcaagtgagaaatgaaagtaacaatcgagaagggcctggctcgtctcttgtgacggaagatcaaatgccccttggttcttgattcgctcaatagtagatatgtgaagcttttcgatttcttgcgtcgtcggcctgcccaaccgggccagcattgccccgtggaggtggtcctgaagtgggcgagcatccgtcgtacctacgaaaggatttccaaactgttggatcaaataattgagattggaagaatctccaacatatggagtttttccacttgggccttgggctgggaaacatggctcttgccgtggcttatctccatcatcttgagcatgagtggtcagaggagggttggaacttgtcagtccttcatacggcacattgcgggaggcctctgaaagatcactgcctaagtctgcttgagtggtcaggggaagaagctttcgtctcctgaatctgaattagtcctagtatgatggcttgggtcttgaatcctaccgtccacgacgagatataatcaactcacattggcgccgggcattccgacagttggaacacgcgacaccttcactgcggtcacatttgacccgccggtcatgacacagacgacaagcgattttgactggactgctgcgcggcatttgataattgtcaaaggcaattgtccgactctaaagttcggcgtcttgacttcggcgaagttggtgagcgcagacccacaaagtcgccgaatttgggcttatctgattggatgtctattgatatctaccctctcattgggtgctcaacaccaacagtttagaacgaagtataaaagttctccaaggaggggtttttactcaaaccagcaaattattcaagttgctgctgaagatgctttcgaatatatcctctcgaagcatgctccgtcgctccaatccgaaacaatggtcacagtgttgcttgcccaccgccgcaacgacacgatacctacgcacatcttcagaacctggtagctctacatctgcacccgtaccattcaaaagccagaaagatggagcgtccgggtatcttttgtaagtccgatactgaattgccaacttgcaacccgactgatttatagttctaacattttctacctagggcaaaggcagacgaattggttaactggggaagacaaggttccctttggcctttatcatttgggctggcctgctgtggaattgaaatgatgcatacctcgatgccacgttacgatcaggaccggctgggcattattttccgtgcctcgccacggcaggccgatgtcatgattgtggccggtacggtggtcaacaagatggctccggccgtgagacaactatatgatcagatgcccgagcctcggtgggtgattagcatgggcagttgcgccaacggcgggggatattaccactatagctacaatgttgtacgtggtgtggaccgcatcgtgcctgtggatatttatgtgcctggatgtccaccgactgctgaagcccttctgcagggtatttttcttctccagaagaagatgcggaggacgcaggtgacgaggatgtggtacaggcgctaagcgagggttgaatgagagtatatatatcctactactcctgacgccacggaagatatgcaacgcttcaaatgccaaaaaccgtgatattcattcttccacctcgaactgcatctctcgctctataatatagatccgtcagtatacacctagaacaaattctctacaaataacaacataccccagatcttggtcgcatgtgcaatgatcgtctcagccttgaccagcaatttcgcagcatacctctccgtctctgtcgggtagagttgacttttctgcgctttgcgaggattggcctaaacacatcaaggacacgtcagtagatgatcacacatatgtatagcccagcaatcctcttcaaggtatcccaaaaaagaccaaaaacccaccatcataagaacaggaaccaaatccttcggctcagcctccgccaaagctctcaaattcttaaatccattatccctgagcaaacgcgccgtccaactcttcacaaaagtaacctgggccatctcaagcagatccgcgcgcgcgccagcctcaagcctatcgcgcatatgatccaagacggctgccatcatgccccagttcatgcgctgacagaatttgaccatgccggcggcgaagccgtggcactgctgtgccaaggtttgaactgcaccgcggggggtgttgtagcgttgggctatcgttgatatggggacttcgttgctgagatcgcggagttgaagggctgtgtaggcgcggcagtagatgcgggcttgttttatctggactgcggtgttttctttcagggaggcgcctgattgggccctgggataagaatgttagtttggggttggtctggtctggtttgttttgagggtgggtgtagaattgtgtgcgatatgtgtaggagcaatggagtagcagagggaaggggaggcgtacattgtgttgacgaaacctggttggactccgactaattgtagagcccggagaccgctctcatctagcctgtctagctgatcgcggaagatttgccaatcaatgggggtgttcacggctgcttggagcggagtgaacatgtagaagatgtgcatgtcaccgtccatgacaaaggcctgtaatgctcgtttcagctcttcgtgaacgaacaggccgtcttcgggtgaaaatgccgaagccacgattgcttgtcctaatggtgtggcttcgtaggattcgtcgtttcgcaaaataagaaggtcttcgtcgactagttcctgaagagcggatttcatgatgctgtatgcgatcttcttgtccaacgtttggtagagaagcgtgcaccgaacatattccttgatcgcctcgcagccggacaccaaccccgttgccacggcttcgagtaaggcccttttggttgtgagcgaatgattcaggagcaataaatagagtagaacaagatacataccgcttgaggcctcttttctcaggtgccaggcagctctcaatagctggcatatcagcgtccaacagatcgcagacagcctgcatatcggctttcacgcagatgagataggtctcgccagcgttatccttgcctttgcggccagcacgaccgcacatttgacgactaattttgtcagcttatactccttactccaagaagaaggtacctacaacatagccggacctactaattgacgccccatgcgcgcaccattgatgataactcgtctcgccgggaggtttacaccagcggcaagactgcacgtggccacgaggactttgagcacaccctggtcataggcctgtgcaattagctcccgctcttcggtggtcatcccagcatctaagtggttattagtaagcgtggaaactggccccatggatggatatgtactaactgtgaaaccctgtccctctgattattgttgtctccaaagccgggtccagtccacaagcgaggctccgcaattctgcaagaaggtcgagtcgtttattcagctcttccggctccgccggcggcatcgcttcaccgatagtcgcagcgtgaatttggcatgcgttacggctgccacaaaagaccaatgacccaaacccagctgctgcagtttcgacagctagcgctaccatggcattagtggcagggttgctgagctgcttagaggtagaaggttcaattattcggtgtggaggaatggtatcgtgtagggacgcagctgcagtcagcttagatgccgtatggaacaattgccgcgaggttgcagctgggtagattccattctcgtataccaagtattcctcaataggaattggtttgtatgtggagatgtagaacttggcgttcatccattgtgccagcacttcggtgttctgtacacctgttagagcagcccaccgagggcttgaaccatagacttacagagagtgtagcactcatcccaacaatctgggtgtcctgctgtaataacagcagcttcgtgaccatcaattccaagagatagccccggtgttcgtcatcgagcatgtgtaactcgtcaagaaccacgactcccaggtctccaacgctacactcttcgatggtgttgtttatcaacgaattggcctaaggaaataaatatcagagctctgcaaacaacactgaatcttaatcgtgcacaccttctctatcgtacaaacggcaatatcagtatccgcccaagaggctgtcgtccgacttccgccaaagaagcccgtcactctgatattcttgtgcaatttgttccatcgcctgcaaggaaatttggagtcattttcatcatcatccgggatatttctttccacgtcttgcacaatgcgacgcatccacttgagcttctcctgaaccaaagcaacataaggcaaaaccaacagcgctttgcgccctgggttttcgataatgcgtttcaaaagcagaacatccgcaacaagagacttgccaccgcccgttggcgccgtgtaaaccaaatgacgttcaccggagagtaagcccctggccagcagacaagatgcctgccatgggtagatattcctaacaccgagagcggcaaaattcgccgtgagagcgggcggcagaccatactttgggttagacagagagagcagggggttctgactagaaggtggggcggtcggtgccacagcttttggaggatcatccgaggttggctccgcgcccgcgcccgcgccaagatgaatcttgctggcagtaaagcgatggacgggggcgattagcagatctcgggcagactgtagcggagctgattccaatatggtgtctgtattgccattttgacgagggaaagtagcttgttttacgactggaccgggcgggatgtcgagaacctgctctgtgggctctgtcgggggtcgtttctgtcctgccacgggcgctacatgatacgcttgtcgacgggcgagatcaatggatgtctggaatccgcgagactggacttgatgacccgttgtcgacatgcctgaaacacagatcgatccattcgtctggggaggggataaatccagttgtgtttaatcaaaattggccatctctctgactttgaaaggtttatgttttatttgatgttgtttgccatgtttttcacggtttgttgtttttccaaggttatctagtcggcttactattcgttgttgctgcctgaggcatggattatatcagcggttatgtcagagatcacgttatgtcatccactcagatccccccggggctgggccagtcaggtctagttaacttgatgttcttagacatcgatgatcgccgcgtttccaataatgtgcgcattacgggattattactcgtattgcatgcttccatgctcccatgctcccatgctctgcatgattgaactgtagttccaatatggccaccatggagtcccttgctcggggactacaccaaccttgtacgagatcgactgtggaggcttatgtggatgccgtcttcccagccctggagcccttgagccctgatgattgcccacaagtacgttgtagaaacgcacaatgaccaaaaacggatattcgtagccccatacgtgtcaatggatgcctgggaacgattggcgcaattatcgtgtgtcgtcggagccgagagggtcggctgacgatctggggccaacggtgatggatttgcctcaacgcggctagaagacatcgtggcatcctcggaacctgcaacatacaacatccacatacatatggaattgcatgcatgttgacttagccttgccagggggaaaaagaggaaagttccaaaattccagtgcccatcccaagatcaagtatattgtacagaatctgagacccgatcggggtggaggcgtcataacgactgtatcatgagtcgcgcgtaccacccacctatgcattaggattagcaggattagccaaattagcaagattgtgaagtttcagtattgtatgacgataacatggaattcactgaccatgcatggtgggaatgtgatatagatctcaatctgtatcctttatttctctgtttcccctggacaaagtcacaagaaacgtctcatggcaagcttgataccacgagcgaaccccctttcaagccaccgtacagatgatggctgtaatggtcgggatgggttggatctgttgttcggaggtctgatcgccgcatacaacatatatctcccagatacatctgacacctgatctcactccaaccctaacacctacacagctactccgtataaacagcacacaacacacatgttatattggcttaaattgtcccggtcccatgggtggatttcccaacggagtaggccggcacgttatacccaaagagttcagaccttcacggtcctcggctagttctcggcggcatcgatcgtcattggagagaagtttaaattacctatattatgattaccctgatactctgatacttagtcctgtgtctgtgtattcccaattcatcgtctatccgacaatcgcgcctcaggacccaccctatcctaatgtacacgaatttatagatgattcccccttttgcctctcccgagatgcgtagccaatcccggtgtgtttggtcgcacaagatcaggcgaacggggaaaaatcaccaaaatagccaacatggcaaataagaaaggtactggccatgtattcctggtaattttccaatatcagtccccagcgactctgtttctaggtagcagctcccactagacctccatataaaactattcacatcccctttgacgtgctgagtagacaccgttccgcataccagcattcctgtctagtgtacgtcggaccactgatcgaaatatccagtagatcgagcaagggaggtccaaatgaggttctggttccccagggcctgtccttggggatccgtcatattaacatattgggactaggggccaggttcgggatcctcgacactttttgcttttttccgttttccttctcttcttctcccccttccccattccccgttgggctatatcgtcttttttttgccgctaaatcacttttgacccgcttctcccgacccatccctccctccactctatctactcttctctctctactcttctctctcctcctctcgcctttcttctattctggtcttctattcttctattctcccctattcatctcattcgagttggccttttcgattcattttcggtaagctccctattcttccttgccattcgtctattagcttgaagaagtcccctatcaatgttgttcctttcactcttgatatcggaaacacccttcacccctgcagagaaagaagatctgacacggtccactctttgtctttcccacttcttttcgcttttcccctttgcaactcccttgtgaagttcttcgtctggaccggtgaatcccatatctgcccacttacccgtattttgagattttcgcccttcccactttcagcttgcattcttccattgagcgtgtcctcttcccgcgttttctaaagttccaaggcgacgggttcccactaatcacccgccacagcttcctctgggcttgatcttttcacttcttacatcttcttccccccattccatcttcatttgcccgtggatgactaaggacctcactcaatgaccactcccaactctccggaggcagtggccgattcggccaacggctccgccaccgcgtatggcacgcgatcgagaggtcgtaatgcccctcggccaaattacgccgaggaccgtgacctggatgcggacatcgatctctctgctccaaactccaagtccgccaaaagaaatagcggcgtggcactcaaccacattgtcaacggcgccaatcacgaggagaagacctcgtcggcgcaaccacgaaagagcctgaccaatggtcagagcgcaaatggatcggcaaaagatgccattcctggcacttcttcattttccgccagaccggatgatgtgaatggatctaatttgagaaaacgcaaacaacccgccagcacgccacattccacccccaactcgggtggtgccgtgaagaagatcttcaccacccctccaggcgattcggaagggggttatttcaccaacatgatgagtttcgaaaactctgggccctatttgcaggatggccaattaatagccgatgatggcaccacttttgccctcaatggttagcccctcacttccttcaaaagtgattgttccaagactaataatttttatagaccatgtttatttgatttgcgaacctccgggggagccatattatctagcgcgcatcatggaatttctgccatccaaaaccaagccgggtggcttcattgaggcaatgagagtcaactggtattaccgcccacgggatatccagcgccattctcccgacactcgatttctctttgcttcaatgcactctgacacctgtcctctttcttcactacggggcaagtgtgatattcgacacgtgtcggagattgaagaccttagctgttacaagaagacgaggaactgtttctggtacgacaaaatgttcgaccgatatatccatcgtctttacgatgtcattccgactaaagatatcattaatgtcccgggaaacgtcaagaaagtgctcgacgaacgctggaaattcattctggtcgagatcggaaaggggaaagaattgacgggtgccgtcaagacttgcaagcgatgccatttatacgccgcaacctctgaatcagttgactgtgcagtttgcaattcaacatatcacatgcattgtgtccgacccgccttgacaaagaaacccgctcgaggctttgcttgggcttgtgccgcttgcagtcgcgcccaggagcgcaaactcgaggcacgcaacacaccattaactggcggcatccgaacagatggcgaagatgtgatcatggaagaagaggaggaagaggatcccaataatgtggcgaatggcatagccaacggtacctccgccagtacccccgcagccgaggaagattccatgcctcaacccgcaactgcggaacagatcgcacaagccaaaatgtggccttaccgatacctgggtattcactgccgcgtggaggatgctctggattacgatgatcgaatttacccccgagccagctcccgtctaggaactcggcaccaggcagtggtccccgcttggccaggccgtccagttgagtacgtgaaaccccttgagacgaaaaagaaatcaaaggttcccggcaaaaaggatggaaagctctctaaggatgcacaggcagcaatggaagctgcgaagcacgagagggcaaaccgaccgaagtgggttcaagatgagccagtgggctatgtgcatcgtggtcaggatgagccgatcataatcaatggaaaacagacgcgcacagccgagcttcaattcaaaatgcccagttctgatcagatcaccgcccgcggcgaagatgacgcacctggctcccatttaagcgatgcagatcgagaaaagttcgtcgacgactacatgcgccaagccaaggaactagcccctggtattggggttgagaaatacagcacaaatttcctcgacagagcccttgcacttctctactctgagaacttcgatgtccaggctgcccttgctaagctgaagaaaaccaacaagtacaaggatcttaaggagccccacatacgaccggaggaactcaagctattcgaacaaggtgtcgccaagtatggatccgaatggcgcaatatcatgaagcacgtcaagactgtccatatctatcagatcgtccgtttctactacatgtggaagaaaaccgccagcggtcggaagatttggggcagttatgaaggcagacgtggcaagaaggaggtacgccgtcatagcgtagtttcatctaaactccttgacgacgtggccgatgatcaggatgattccgcctttgactccgagaaagccattgtccagaagcgtggattccattgcaagttctgctctattcgccattcgcgacagtggcgccgtgcgcccctagttccccccggcaccgtggttccgtccgagccctcaaacaagaaagacaagggccctatgctcaccgttgcgctctgtcttcgctgcgccctcctatggcggaagtacgggattcaatatgaggatgttgacgaggttgcaaagaggattgcaggcagcggtaacaagtcatggcgacgccgaatcgacgaagaaatgcttgcgcaactgattgtagctaccgaaactccgtttgtcatcacccctgctacggcaactacggctactgcgatgggcattccgcttgatacaaaccctcgactcttgatggaaggaaagccggaaggaaaggtggaaggaaaggtggaaccgacgaaaaagaaggccaaggaaacgcccgctccttcaactgcgacatccgttgaacctatgccaaagaggaagacgatcccggagaaagtggtggaagctccaccgattgttcccgacccgccaaaggccaagaccctcccttgttcaatctgcaaccaaatagaaccttcaggtgaagagcacctttcatgtcgggattgccgtcttacggtccatcgcaattgctatggtgtgcgggattcgcgccccagcagcaagtggctgtgtgatatgtgctccaacgaccgcactccctcgatttctacagactacacatgtgttctttgcccagtgtcatggaccgaacacgacctcatggagacgcctaagaacaactcccggaagaagactgagcgtgacaaggaaaaggagcggatggagaaggagatggttgcggaggcgattaagctttatcgccagcgtcaggaggccgttgggaagcctatcggtccccgggaacccctgaagcgtactgcaggcaacaactgggcccacgtgctttgcaccttgtggaccccggagttgaagtatggcgatgcagaggagcttgagcctgcggaaggattcggatctattcccaaggagcggtggcgcgagacgtgtaaggtttgcaagtcaaataagggtgcatgtgtaccatgtagctttgctggctgcaatgctcacttccacgtgggctgtgctttccaagcacgctaccggttcggcttcgatatcacacccgtcaagagctcacgccgcgacagcatgcgagctattcgtctcggcgaagatattggagcagcgacacctgctgtttactgtccaaatcaccatgtgtccactgttctgcacgaaatcggtgagcagacaaaccagcatcatctaaacgctctccaattgttcgcccagacctacaagcaggccgacctcaccctcactggaaccgttcgcaaagcggcgtacatgcatcaatccgtcggagctccgccacacccttccaccaatgtcaaccgccgggcttcaacgagtactacgccggcttccagggatacccacaaagttcagccggtggaggatgtggctggagatcccatggatattgataccgacaaccatgttgcatcgcgaccggttgctcctggcgtggagaccaaccgcaaatgcgttcgttgtgccaccggctttagtcctaggtggtgggctattgggcgacgacctcctatggccaatggctctggacaccctcatcatccgccccaaggtcccttcccccaacaaaatggagatccttgcgaaatggcatacgaatgtcataaatgccatttgaagaatccggcgcctcctccccctccgcctgtaccagagcccacgcccgaccaacggccttcgccttactctgctcaacgccccatgatacccacctcacgaatgcctggccatccaggtcatccaggtcatccaggccatacatttttgccacacccacatccacacccgcacccgcatcccccccctaacggtgtgcttgggcggccgatgcctcctgctcacccatccaacggacttcccggaccaggatacactggaccatacgagcagcgtcacacgcccgatatcggtattcgcaacggcatgtcgccgtctccttatcccccggcacagccacctccccatcacatgaataactacccgccaccccatcctgcagggccattacctcaacactataccagtgctgggccttcgggacctccgccaccatattccacccaccagagcccgtatggccctgtgccggctcgctcgccgcatctttcgcagccaccgccgcgatcatatgcagcgtccgcatcccctccaatcgtgcaagcgacgacgatcaaccgatcaccccagacctcgctgagcgctctcaacggcggtccccctcctcgcatgtactccgttgagcgtgtggtaggagccccctctcactcaccaccggtgacgcaggcacgcattgacccgcgggggcccaccgccactcctcccactcgaccggaagatacaccaccttccctgatgggcgggccaccaagcagtcggcactctggggtcaacggtacagcgcccgggaccggagcgagcgcaagcccatcgctgaagaaccttctctcataacgatatccccctacacgagtgctcctaatcgagttgtatgatagtgacctttcctatttgcttttaccgctactgcatatgcatgccacggcatcacatgaacaaaagtgtgtccgcggttggattctcctttctgtgttttctctttgtttttctttcctttccagctacggagaccccgagcctttctagccggtagatccacctatcggccaccatctttcaccctttatcgtttcttcttttcttatgtgcttgttgtttttcggcgtcttgaattacggcacctgggaaaagtccgtggagtctgttaaggagcggttggggggcttgatgtcgtcgaaaatcacggattgcatggagtaggattggccactttatgattgatatcaccattacccatttttccagctagatgaattgttcaatattgctatgatctacattttctgattcttcaacaatcgtacattatccacttaggtgtccggcatattataaaccaacctcggaagctggcgatgctgacaaatgccgatcaaatgcggtcagttcgtcatagctgttccaaggttggcttcaggggatataaaatagatcttctgcagatatttgcatgaaaaacacccattgaacacttttaagcatcacccaaaatgagcgacaccatgcgagccatcggtaagtgagcgcggggttgaagaacatttccccacctgatatcatctacacttttggaatggaggatcatacatcaacccatctgcttcacttcattactattcactctctttcctctatacccacacctcgaatactttaatactctatacaatgtcaaccccaagactaacaaaccctaggcatcaagggcggcaaaggccccgcaacaagcctctttgtcgaccagatcgccaagcccaccgccgcagaaggcgaagtcatcatcaagatccgggccttcggactgaaccgcatggacctgcttcagcgcgagggcctataccccgtcccaccccaagcacccccaaccatgggcgtggagttttccggcgtgatcgagagcttcgggccggacggacacgaagacttcaaaatcggagatgaagtattcgggcttgcatacggcggcgcctacgccgagtacatctccgtctccgctcacatgctagtgcacaaacccaaagagctatcatgggaagaagcagcaggagtcccagaggtgcgtacacccaattcaatcatctaaaagaaaaacccgctaaccaccacccgtagacctggatgacagcctcgcaagctctcttcctaatcggcgaattccaagcaggccaaagcgtcctctggcacgcaggcgcatcttccgtgtcaatctccggtatccagctcgcgaaagacgccggtgcaaaagccatctacgcaacggcgggctcgcaagagaaaatcgacttcctagaaaaagaactcggtgtaacgaaagccttcaactacaaaacccaagattgggcggcggaaatccagtccgcgacatctggcgcgggcgtcaatctcaccatcgacttcatcggcgcgacgtatttccagggtaatttggacgtggcggcgcgcgacagtcgtattgtcttgctgggccttatgggcggtggcaagttgcctgacggggtgaatattgcgccgttgctgtataagcgtgtgcggattgagggcagcacgctgcgcagtcgggatctcgagtaccagcgcaaattgcgggatacgcttgttgagcacgcgttgccgcggttctgtgatgggacgtttaaagtatttgtggagaaggtgtttccatttgagggcattgaggaggcgcataagttacttgagagtaacactactaaggggaagattatttgtgtttttgagtagattgcataacatcgaatatagagaatgtggaaatattatgtacggagtacaatatgtagataagctaatactaggcatagccaagagatcgacaaagtagaccccacccttgccatttacaaaaaaaaaagaaaagaacacatacggagtatacgcagtagtacatagctgtataatttgccaagtattgtaacataaactacatacatatatatgtaactagaacatatagcagttctaaaagtacctgggcatgcatgcagctatccctcgtgccgttgattggccgggttccccttccaatcacatggaagctatcagcaactgaaccgtggatgacatggagattagctaaggccacatagccacctgggcatattagcctaggactgtccattttatgtatgacgtgtatatatttgcatacattcaatattcttcttaatatagataatcaatgccctagcctgtgtcaagttaaaggtgaatgcatgcaattgtacctcctgcaggtgatccatttctgaaagtggagaacaatcgatgagatcacctcggattatctaatattccgtccgatttggccccgaatgggcccatcttatccacttttttcttttctttttctttttcttctgcttttttctttttttttcgattctgcagggtatgtgtattaatatctagtatgtacaatagggtattccaatgtagtatacaatacttgatgtattgtagctaaatcaatgaatacaaaattactacaactacctacatatatgtaaagtaatatatgcagtgagataacagaagttcgagataactatgtcgactgcatacatagctacccgaccgccctgtattgtgttacagaatctgtgcttactaacccacagaccttctagaaagaaggaaaaaagaagagaggcgtcattgggcccactggttacgatcggaggctctgcccaagaagcaatggtatagaggaagagacgaagacatagttgagagatgagtattctgctgataatcgagtaattagcgacaagtcaacatccctcaagatactcaccaaaattcaaatatacctgctagtgtacccaagaccaagattacttgaggatcatcccgtcccgccccaaggccttctggaaggaggaaagaagccccttccccgtgttcgcccctccacttgtcctcagctttgggtgtttttgctctttttaccaacttctttatttcacttcccttttcatcttttctttgtttatctcaccgctacacgctacacgcatacaccacaccatgtcgaattgacgtcctttcccgcctctcccttttgtgttctttcaccaattgaacccccttcgtcctcgacaaactcacgtgtcgctctcatcccatcgctcgtccgaatccgactccggggtagaaaaagtgggttgcgcgctcgatctgtctagtgcgacaagtctaggacaagtctaggctctgggggttgtctcggatcctccagtccataacgcgactcggactgcctcgctgcaggagacaactccattgttcgattcggtgacctgagagcgtgcttgccgactcctgccattccttccccgactttctttgtgccgattcaatcggatctttcccgacctcccatcaccctcattccagccgctcgtttttttcttttcccttttcacctctcataaccgtgctcgtcactcgtaccttctaccattcccctggtcttcgtcatcagagccatatgcgagccaggaccgctccgaccgactcctttcctttttcttcactccgattgagttcttgtcggtcttctgattccagcaagccctgatcgggggtcgttctcaaccttctaacatcatggtggaccgcgtggattgcgcgggcctgtacattgacgaccgagtgcggtcggagagatgggtgcgcaggaattccatcgatacttcaaccatctcgtgcgcgggttccttcgcgacacccgaagaaccggaggccctgcaagccgatgtggagcagctgttgttggtgtgcaaacaaggtaggttctacagacttgcattgcgttcgatgatttgctaattactcccgggttttgcagtctatctctgccacaacggctcctcctttgcgacgaaactggccgagctcagcgaccgggcgggtagcgaatgcaacccgattttcgcattcttcgaggttgacttcagcggcgaagagtcgaacttggctcgtcgaaaagccagtcgcgcttcatgggccgacaatgctcctccttcgccgggctccatccaccgcactttcacgttttcaacgcagtccgacgaagcacgggggctgtcccttctgtccggtgtctcaaacgatattcaagcccaagaagggccaaatttggtcatccccattgctattttgcgccttcctactcccgatgcccctaaccatgcgtctgtcggccctaccagtcaaccggattctcaaggacctcttacggtggagcacaagcaaattgcccgctgtcttgatgccggtgctatggatgtcttgaccaccccgctagatcggtcgcggatccaagggcttgtggttcatgcctaccgcacccgtaaagcggctcagagagagatgtcccggttcctcgcacggagaaagcaacgaaagctttcttgggtcggcgtgcatgatgagcagccatattcttatctacgagaagccatggtttcaaagctcatgaaagggatttgcaacccagaagaagtcatacatgatgaattccaagagctggatctcaacgttgatcccgcgcgtatcccttttgtcagaaaagaggtaggcagttggaatttctgcgctcacgagttcactgaggacgaactggtctttggcgcttgtgagatgatacaacatgctttcactatgccaggactggacccctggcgattgacccccgatgaactgcaaactttccttctcagctgccgcgccgcctataactccttcgtgctttaccacaatttccgccatgcgattgatgtactgcaatccgtcttttgcttcctgctccgcattggtgcattgcctccatatcaatcaattggtcaatctcctgtccccgaaactcccatcacctcccttctcacgccattcgacgcccttaccctccttatctcggccattggtcatgacgttggccacccaggcgtcaacaattttttcctcgtcaaactcaacgcacctcttgctcaactctacaatgacaattccgtcttggaagcgttccattgcgccgccttttcccagattttgcgtcggcactggcctgccgcattcaaggacaatcagctgcgaaagctccttatcagttctatcctggccacagatatgggtgtgcaccagaagttcatgcagcgaatgggctcattccaagaaaagttctacgaaaacaaccaatctgttgatggctggaagcctcaagatgtcgacatgtacaagactctcatttgtggattactgatcaaatgtgccgacatcagtaacgtggctcgaccgtggaaagttgcaatgaagtggacgcaaatcctgcaagaggaatttgccaaccagggcgagatggaaagggaggttggaatggaaaccgcactgtttggcgggccgcccgaattagggaacatctacaaactggctactggtcaaattggattcatgtcgatattcgccctgccactctttgaaggcatttccgaccttctgccccagttgcagttcgctacggaccatatccttcgcaatcaggcacggtggcaagaacttgctaacgaagagctgaagaagcaaggtcttccaattgagaaacgggccgaggtcactgtttcgcctcgctcccgtagccctgcagcttctgacaagcagctcttcaatccaggagatggcgcagcggatagagtcaaatatccagatgatggatacaacgaaaacaccattgaaccagttgtgtcgccagatacttcaggtcctcagatcgagattacaggaagtcccctggcgccggtggctgaattttcatcacggaaatcttctaatgccatcccggacctttcttgtttctccatcccaggagccccggagtctgcccatgggtccatctcgacacagcttcatagccctctcacagaagcaagccccgttaccgacgatcctgctattttagccgccgtcttgtatgccaactcggctctcggtaatgggaattcgccagtggggcgtggccatactttcggggctgccgagagaccaagcagctcccgccaaggtctttcacatggttctcaacgcgactccgaacgccaccatgcgcagcacagctcctctgcccgcacgggctctaatcgcaatagttgtacacggacgcaaagcacttacagcaacaccatgacacctatatctcccgcaactaatgcctcgagctttttagccgtggatagcggcgacgaaaagcgaggctccggggaaagtgccgcgccaagtgatattggaggacctgaggacaatagcacacgtcccagcacagcggacgtgtatccttcaggtttaacagcaggcggtttcagccccggtcgcgactctatcgctcgtagtcaagctcgatccgaagatggcaccagcaaagacttctccaggctgggagcccctgggacccgcagcacgactcattcaacgactactggcgaaagcatcaaaaatgaagctcctccagcggatgactctcatggtcatcatagacttcctaagcggaggagtcggcttcgacttgctttttggaagcgtcgtaaccattcgcacgaggtccccggtgagacatgaatcttgctgtcctggttggtgcttttaggcttgaacaacctctagctgtgtataatgctgccatggtcttatgaacatttcattctccaatgaggcttgagaccacactggtgttccatgaattcacgactcgaccagtcgaagaacccgatcaatgggttttcttttcccgccgcattggctctcctggtcacgactctacgaagtcgatcacgataccttcttaccttctgctggacgtccgaggttgtctcggacacgaaagcaaatgcaaagcttgtctgagcaattacagcatcaagacaagataagttgcatgttttactctactctcctccctcggggctgagagtcacgcttttatcatatagtcctctcaatggatactgggattggtgtcccgctacatctagcatctgattatttgcatcgggctcgcccacctacttctgtgtgatgaccacgaatgtctgttttctttcatccttaccttacaccttccttcatccctctttctttttcccttctactccaccattgtgtgatatttcggggcggttatttcttatcctagagttcggtgataggccggcgtttgatctcctactggggtttctttgactcgatattcgggatccttcgcgatcttggatagtctttttctctttctcccctgtgcttgatcctcttgtgtttcgttcttttctctcttctttttttttttttttacattgactcttgttagactcttccgctctgcgcgataatgaatgtgatgtgtatagtggcttgtaatgattgtaagatatgtagttatgttccaagtagtatatatgatccagcatttatgccaacatgatctaaaaatgaactccatgaagatagcaagtcaaaacaatacccaataccccctactgacaatcctcacaatccgccttacccttactcttttcctcctctttcacttccttctgctcaccctgctgcttctttaacgcccgatccgtgtgtcccaagtctctatcaggagcaataacatttcgcacaagtgacttgagcgctttgacttctgaggggaggaaggaatggtcaggacaaggctcccatgcagtaaataagaatgcatagaagaatatgcagtaataaatgacaaaaccaaaggaagaaaacataccaggaaaacccccatcccgcttccgatcccacaaaatgctctcctgcgtcgtgatctccccatcattcatggtaccatgccatatcgtcacagtgaacacgccgccggttttcggaacgagggcgacttcgccgaggtctgtgctgaatgttgagagaagttcttgggcgaactgttggtttcttatgttagtattggttccggtttagtgaggtctgtatattatgtccacggtcacggtcatggttatgttggcagtgacagtgacggtgatatcgagtctgatatatatggtatgcaatagcaaagtaacgaatcacacttcaccccgccgcagaaacgatacaaccaaatatctctaacatgataggtcaaataggaaagataacaacgtacgtatgcggcgcggagcatccaccggcactgtgtgcagaactggattgagatgcgggggagatggacgttggcgggtgcaattgtgtcgctcttattgggggttgagtctaacggggtcaatgcagattcggccatcatggactgttggtttgatgttggagaatgtattgggggcgtttgggtgattgtggtatggtcaagtcgatgtctcgggatggatggggatttggatgatgtcagcggggatgggctgacttgtgaatatcaaattacgaaggtgtatagtggccaacagtcggatgcctgattttaatggttttatcgcctaattgggactagctcttaccagttttagaccgcctttgacaccgctcaataccatcttttgtaagtacacatcgaagagacgaaactgttaccatggggtaattcaaatgccttctacctattttaattctcaaaactacattcaaatattcgccacgccggagccagaggatacggagagtttgaagtttatacggtcggtaggaatggggactttgtgttgaaatccaggcttggctttccaaccgttttgggccttggtgtcagttgcgctattagcttttctccgggaaagtgcgggactacggcgggtatgaatggctttaaatacaggagattcatatagttggagggccttaacgcctaggatcgatgagaaatagtattttggggggggggggggggggtatgcaaactttctttttccaatttttaaccnnnnnnnnnnnnnnnnnagatgggggggggggggggggggggggggggggggggtatgaatagcttcatgtttcaactttcaagctgttctcaatttggtactaggagatctgtcatagtaattcaggtattttaatttcctgccggtctaaaattggtaagagctagtcctaattaggctataaaaccattaaaatcaggcatccggctgttggccgctatacaccttcgtaatcaaatcctgtcttacaattgcatgttacatgtactagattggaataatgcctgattcatacgttgtataccaaattactttgcatgacttctcaattgccaatttaagctagacaaggccgaaacaaccgaggggctgaaccccgacgggtcatcccagccgcgattgccggaatttggaaccgaattggatgaaaatagcgcaatttcgattagatcggtatggtattggtcatgcgaatctatgatacatgaatggcaactctcacgccctgaatggaacatagaggctttttgaagatttgaagagaaaccgtaagaaaaggttacataggagaaaatgaaaaggaaaaaaggaaaagaaaagaaaaagagaagataatgccgattccaaacaaaaaagcaagaaggggtaatggtgaaattcaaagaagaaaaaaggcgcaacaaatgcatcgtcaagtgcactgtctgcagagtctgagaacaaaggggaccggaggcgaaaagggcgacaaaacacaacaggacttgatccccggaggcgtggaaggtttcgtgcaggaccagcagacgattctttcaggccgacatctttgtccgcgcgagcaatcgcaatgctttgttcgggtccaaggggtggtcgtgaatgggaccgggattaagtagaagagaagaaaaaaggagagcgaaatcgaaatcgaaatatcatggcgaaaaactcccgtcgtgagtgcattacatgacggtgcagcaacccccctgttgctgaggagcgtagggatcctcgcgcttgtcaacctaggaaatgaagtggttagtctggatgggcgcgcgcgatgtggaaaaaggccggtcgcatacctgtccccatacggatggaaccataaagtcgcgagtgttgttgcagtagctgatgagactgttgaggtgttagttgtttgctttctgaacatagaaaggatcaaacggacgaaagagctgcctcggagaccttgacccgtggacggtccagatcctcctttagacgaccattgagctcggtcaaccgacgatatttcaagtcggcaacactctgcttcttgttcttgacatcacccccggatcgaagttcgtagggagccatcgtgacgtgttgagctgtggaagaagcgcgaatgggagaaaggggggagagggggtttttggatcggcaggtgttccaagggcgtaagaattaggttaggggggggggccgggtaatcagggggccaagacgccggacaaagaggaaggggaggaacaaaagaaggtgaaggagtcgggttagagtaagagagagagaatggacaaatgaatgtgttcagaggggattttcctgaggagatgggcaggtccgtgggtttcccttttttccttacacgggggatattattgggaggggaggtacccggtacttggcatgagtcggacgactactaatgtttgataggtggatacagtacataacttgtaccgggtacttcctgtctgaactctggattgtgtatatttgtcgggctcggaatgagatagttggaattgtaatctttagttacatgacttggaatattgcagtcaaccaataagaaaacatagtcacaatatgcacggtagtcaaatatgacaggtgtctgactatgtaccgacccaaattcgatatctgcctcaggccacaacacgtgatcgtcatcgcttaacgcgaagtgggaacattggcgggatccaatttttgctctggcctcaacacgcacattgtgaatcttcccctcgttatcgggtattcgcgtggcagtctaatcgcattattccctgcccgtgtgtgtcgctggcctcacccaactttttttgtccattttttaatttcttatcagtcacctttgatcctttcccaaggggcatccacccatcatgccgcctcctccgcatattaagcctgagaatgtcctcaaggtaagcgtcgccgtcgctggcgtcatggttcataagatgcatcggttgctaatgactatatcgtgcacagagggctcaggaactcatcgccgtcggccaggctcccgccgccttgactgtcctccacgaacatgtcacctccaagcgcacccgtagcagccccatcgcctccctcgagccggtgatgctcctgttcgttgagctgtctgtcgacctccgcaagggcaaggccgccaaggatggtctttaccaatacaagaacatcgctcagaataccaatgtcggcactatcgaggttcgtgttgatgatcgctctaaaaaaaaaaaaaagatgaaaaaaagtgtcttgtcactaacttaggatttcttccatgtgcaggttgttctcaagaagttcatcgaactcgccgaacagaaggtcaccgaggcacaggccaaggccgacgagatccaatcgaccctcgagtccgccgctccttcctccaacgttgaggatttggaggccatcgagacccccgagactatcctccttgcaactgtctccggtgagcagtctcgcgaccgtaccgaccgcgccgtcgtcaccccttggctcaagttcctgtgggagacctaccgcaccgtcctcgagatcctgaagaacaatgcccgtctcgagataatgtaccaatcgactgccctgcaggccttcaagttctgccagaagtacgcccgtaagaccgagttccgccgcctgtgtgagctcctgcgcaaccatgtgcagaatgccgccaagtactcttcgcagatgcacgccatcaacctgagcgacgccgacactctccagcgtcaccttgacacccgcttccagcagttgaacgtcgccgttgagttggagctgtggcaggaggctttccgcagcattgaggatatccacactctgttgaacctcagcaagcgccccgccaagaacattatgatggccaactactacgagaagcttgctcgcattttccttgttagcgagaactacctcttccacgccgccgcttacaaccgctactacaacctcctccgtctttcttcagtggccctggccagcggccagagttccaagaaggaaaacccgtcggtgaccgagctcgagatgaccaaggccgcgtcatttgtcctcctttccgccctgtccatccccgttatcagcacttcccgctcccgcggcgccctggtcgatgtggatgaggctcgcaagaacaagaacacccgtctcactaaccttctcggcatggccacctcgcccactcgtactgtgctcttccgcgatgctctgaacaagggtctgctccgccgtgtgcgccctgagatccgcgagttgtacaacatcctggaggtcgacttccaccctctgtctatctgcaagaagattacccccatcctgaagcagatcggtgccgaccccgagatggagaagtacgttgtgcctttgcagcaggtcattctcacccgtctgttccagcagctgtcccaggtttacgagtccgttgagctcaagttcgtctacgagcttgcccagttccctgctcccttccagatcacccccgccatgattgagaagttcatcatgaacggttgcaagaagggtgacctcgctattcgagttgaccacatctccggcgtcctgactttcgactccgatgtcttctcttcctccaaggctacccacgccggcagcagcgctggctctgctgagagtgagtttggctctgttcaacgtctacagcacacccccgccgagattgctcgtttccaggttgcccgtctcgccaagaccctccacatcacctgtatgtacgtcgatccctcctacaaccaggctcgtctccaagccaagcagactgctcaggcccgcgccattgctggtgtcacccaggagcacgaggagacccttgcccgtcgtgtccttatagacaagaagaaggaagccgctaccgatgctctgcagcggaagcagcgcgaggaggagactcgcaagcgtgtccgtgcccagcaactccaggatgctgagaagcagcgtctggccgatgagcagcgtgatcgtgagctcaagcgtatgaaggatgagcaggatcgcattcgccaggaggagctcaagaagcagctcgaggagctcaagactggtgttaagggtattgacgtcagcgagatcgaccttgacgagcttgatgccaaccgcctgcgtgccatgaagctggctcagcttgagaaagagaagaacgagctgaacgaccgtatccgtaccactgctaagcgtatcgaccacttggagcgtgccttccgtcgcgaggaactcaagtatatttccgccgattacgatgcccagaagaaactcgaccgagagatttacgagaagcaggtcgctgatgaactgcgtgagtctaaggagaagcataccgaggccgttctcctcaagcaccgtctgggtcgtctggttccccagttcagcaacttccgccgagaggtttccgagaagcgccacgaggagttcgaaaagcgtcgcaaggccgccgagcgtgagttcgaggccaagaagaagcagcgcgtcaaggaggttcaggaacgccgccgccgcgagaagcaggagcgcgaggaagaggaggctcgtcaacgagaggagcaggagcgtgccgagcgtgaggagcaggagcgcatcgctcgcgaggaagagcgccgtcgtgtcatggctgaggagaaggccaagcgtgaggaagagcgagcgtcagtattcccctattttgatttcacttcaaaccttagtactaacttgacatatagtaaaatggatgaggtggctatgaagcagcaacagcgggaggccgaagccgaagcccgccgcgcagcccgcaagggtggattcgaagagccactcgaacgaactgcaccccgtctcaatgtcgccccacgcactggagtcccgtccacctggagagaacgtcaagccgccaaggaagccggtggtgtcccatccgagcccgctcgtgagcccgtccgtgtccccgtccgcgcccccgtccgcgaagagcccgcccctctccgcaagggtggatatgttccccctcacctgcgcaccggtgccgtccccagcgctggatctgcaccccctccacctgctccccgcgagcctcgtgaatcccgcgacactctgccccgtgaggcccccaccgagcgttgggcgccccgtcaaccccgcgaatcttcttctcagtctcctgctcccgcttcggaatccaagcccgccgctggtggcaaatgggtcccaagatggaagcagcagcagtaaacgaccgagctacgactttccagttaaaaagtgtatccaagctcttctctttttggcgcaattctcatgacccttctgcatatttcgtgtatcattcacccatgttcaccccgtaacttgttaatgggggccccagttctgtctttcagctcgctcggaatatgatataatcttttcctagttttcgctataatttggtggtcttgtagatgttttggacagctctctttcttcctatctacggacaatggtggtttgagccgatgctaaccctcgacgacatcattggccccgcacaggtacaggtcgcatacaggcatgcatctagaagcgggtatattttttaatgaattatgaggtcgagtatagaatagaaagcatgagtccatgaagcgaattggaatggatggtatcacgatttcaagtagaaactgggaagctcgctcaacatgaacaactttatgaatgatgatatagtaaacatcaatatggatatctgacaagagaataagaaaataaaagacaacagtctaaattccgagtcctgacccgaggaaacagaaacagaaacgcaaaaagtgatcaagtcatgaacatcaacatcgaacttatgcagcagccacttcggcattagccccaaatagcttctcccgccattccccacagacagcttcaaagccactgactacatcaccgcagaccttaccagcctctcggtccttgagccggcggtcccactcgccgcgctcgatccaccgcgaaccctcttcgcggctctcttcttcccgccggatgtcagcgacgagttctcgcgcagagcgtaatcggcgggaagccgttgcagtcaattgtctcgattcgtagagggtatcgctcaagccgcgaagtgtatgtgtgatatctgctgtttgcgagatgagggcttggagagaggctagggggttgtgtgcggaggactgaggggttgttgattgggagtcttggtgttgttcagggaagggatatggaagatttggcaataagccctcgtcgataaggggcatgagagagtcgatggcgtcttcggaaaggagggggaatggagagaagaggagtgggtggacgagggattggagggcgcgcgtttggtgggtgagatgtgatgtgattgaggaatgagcggtgataagtctgcgactgaagattagctatcgagatcggtggaattgcgtcgtacttcatgaacttacctcatggcactgttctcaatgccactctgcccaccaagatctttcaaggactcgaccgtgcgctgaatgacatggtcattttcacttccattattctctataccccgccgaacgagactctcaatctcagccatttggctctccaaggcgggggatatatccgccgcctccagatccgagtcaggcccataatccgagccatcatattgcgactcctgccggcggtgctgccgcaaatgattggcacggtatttgttctttgatggatggagtgaatctctttctggtgagatagatggtgaccgggactgcacgctgtgaactgattgcatatacatatcttctccatcactgtgacccatgtgctgtgaccccgcacggctagcttcctggcctgacgcatatccatatccatcttcctcttctccccatgcatcagctagctcatcggccaggtttcctagtcctccgccgcctgcatcagcggcgccagagaaatccccggaccctctatgggacccactcatggcgttggagttatggcgggacgcggcaggagatggaggtgcagataatcggggtgtccgcagtgatctggggctttcaattgcaaaagtattcccagtcccgggggagataggtgagtcgtctgtggccgccgatgggtagcggtgtgggagtttcaggggagacggaggggggggcattggttcgttggaggtatcacacgggatctcctggtggaagctttactgaaaagctggagaattgggttggggcaatatagccagagaaaaggaacaagcggttgtagtctagttgcaggcgagcaacagttgttgattaggacgctgaattgaatggtccgatatctccgatccgggtcaatatatagcgcagtagcaatggaacaaagaccaagctacggtcaattgatataaagaacgcgttaaaagagcgacttctcaattaaggagtgactgcatcaccaggatgtaggaggggtataacacaacaattcatcttcaacctcaccgccgactactactcgtcaccgcccggcaaaaaagaacaagagcatcaaaccccacattatcacactcatatttcccgatatcaagatacccacatgagtattttcacatttataataccaagatgagttctattgaacgcatgtccccgttggacctgctagaccttaaccttacaaatctcgacccgctcactgagaattatgacctcggcttctacctgaactacctgaacaaatggccctcattgttcagcaccgtgaaggaccatgatgccggcattgtaggttacagtatgttgaattctccccctagcttggcacatcctccttaggctccctggatatgactgacatgttccttcgtagttatggggaagctcgaagagcagcacccagcaatgcgtcactccgagcactacacaccatggcatggacacatcacagtcctgaccgttgccccagcctggcgccgtctcggatttgcacgcaggttgaccgaacagcttgagcgaggatccgacagcaacgacgcctggtttgtggatctctacgtccgtgccggaaataaagttgcatatgacatgtacaagggaatggggtaagtgtggcgatatagatacgtccatgctgaattgatggctgacgtatagttacaggtactctgtcttccggcgggtggtcaattattatagcgatgatccatcggggatgtcggatactggggaagatgcgttcgatatgcgcaagccatgcagtcgagataagaagcttgagcacgtgagagaaaacggtgagaacttccctgttgggccggaggatgtgatgtaaagcatccttctttctgtggttattgaagcagccatggctgtcattatttactatctctccccttttcttcgagggattctcatggaatgggggggttacgcagggctggggttttgatggatatttgtacaaaattagacgtatgatagttgccattttcgtctaagtataacatgaagtgcgctgtgtctcccactggctgggaggtaatgcaatatgcaaaattcaaaacgatgaccgaatgatgaagctaatggtataatcgttgttcaacatgtgtatgcgaagaaatagccggaacaaggccgaatcttccggggtggtgggcggcagccaatattcaaaccttggcatggaactcaagacccgagcgcagaaatctaacacaggtcataagaaccgtagaggtagcgagacagcacgcggtgaaaagctgaactccgagaaattggtttgtatcggccaggattgcaccaccgatgggggtaccgatcaacagacctatggaagtgatagcaaagaccatacccaaccgagtgcccagattgcgcacgtccggagtcatgcttgccatgaccacaggtggcagagacacaaacccacccgagaagaagccgtagacgacggcaagaatgatgatgccaggtacggtgtgaacacggatccagacaaaggctaggatggaagtgatggtcacggcgggcgtgagcatattcaaagggccaacgtggtcggcaaggaagttaggcgcaatacggccgaaggtggaggcggcgtttagcatggagagtaggtagaatcctaggttcgaatctacaatgcctgtctcaattgcgtaggactgcacatagaaaaggaagttgtagaagcccaagaagcccatgaacatggcaatggcaaagacagtaaaggccggctcctttaaagcagacaactggtagagctttcgcttctcctttggctggaagcgcgagcgcatgatgctaatagaaaaacaaatggtgccaaagcagacgaatccaagagatcgggtagcccaggcaaaaccgaccttcttctgcaactgatcgaacatgattgggtagattacaccaccaatactgctgccactggcagctaagccattggctagtcctctcttacggtggaaatactgcggcaaaatggcaacggagggcacgaaaagacagcctgctgcaagtccgacacaaacaccttgggaaagaatcaggtgccagtatttagtggcaagactggtcatcatcaagccaaagggcagcatgaaagcagcggtgataaggagggatcgaaaatagccggcatcaaacagtggacctgtaatgactccaatcatcatcagaagaaatgactgcagcgatccaatccaggcaatggtcgatgatgaagtaccgacgagcaactctcgctcataataagtttgatatgctccccatgtattgatgattcccctgtttcaacgcattaacaataggatctttatactgaagaacttatatattcttaccatgaattgaaaaaaagaaagaatgagcccaaagcttggagccatgtatgtagccccgtatcgaatgttaactgaggcccaggctcttcctctggagaatgtgatatattggagttgacattttcatcgcaagtagacgaaggatcagcgagtactttttgctctatatctaagttagttgactccatgttgtttcatgtcacaggtgagagcctgtacaatgtagtcttagctgtgcaatggtcaagaaagtgacaatcaatgatataaaaatctttccagttgattataaaccccaaaccaagcggggttggggtatagggcgggcccccccgagatcggccattcggccattcgagagatataagaaagataaccgggctttcactcgaatatgatatatagctggacctggatatgttatagctacttgagatttgttgaaataacatagtatatcctttgtcaaccaagtaaacacccttactgacagcaaatcggtcgaaaccaacctagtcaccagcgaggtcaatgcactaactcagatgtaacattgaatagccgaacttgtttttcgtcgagaggacggtcttaacacaggcagacgtgcctggaatacagatggatatggaaatgactctaaatatcttatcaagtgcatccagatgttgatatcaaaattgtaactggaagtatacagacacaaaagtatatcactgaaatcctgacaatactcacgtggccgctatgattgcttctatctgcaggaagataaacaggtcaaattatttttagatatgtttttttttccgttctagattcatgtacaaagcctcattggtgtccatgtttcatcaaggacatccaagtctcattttttttgacgggttcttcgaatcccagaactccaaacgctatgctgaaaaagaaaagcaaaagatataaaacagcctccgtggagagcagttgatagagaacagttgataccggtttgaccactacagcagctcctcacatgtccaatcctcatacctaaagtcgaacattgttagacctggcccaccaatcatgtctgacaagatattgcttaccatccatcgggcaggtatcggcgaatgatcaggggaatcttcttctggttcaattccttcatggcgatctgaaggggatcggtttcaccttcgaggtcgacaagaacgggggcgttcatactatgccaaatgtcaacaagctcaatttcacgtaacaaatgcgcaatcatttgcagcaaaagcaacgtacctgatttgcagggcacgggtaccaagaacacgcgcgcgctcgtacttggtcaagtacggggtggtggtgcgctggtcattgggtactttcttctcgcgcgactgctccagcacttttcctgcgtatccagcatttggatcgccagagacaacgacattatcgccgttggtggccgggtaatcatctcccccaaccgtgtcttcgccctcgaggccctcttgttcctccggctcctcatcaaacacatcctcgccgggctcgtagtcgaagctgcgcacaccacattgttagaaaacgggtctatacaagtatacgcgaacacgctgtgaagctgccaggaggcacaatggaagcaaagctcctttgcgcctagtccctgggcaatctggtgaagggtagcttacgtctcttcgacgtcgtcgtcgtggccgtagtcagacataatgacagttaaatctgcaaaggagcgaactgtttgtaggccgaagcgagcgatgaaagacccagaggtatgagagacaactcgggggtcgaggtgggatttgatgctaaaaatcttgggagcggaaaaacttcctctgtgttgaccgtcaccgcctttctggcaaaaataaaaaatattagtttggcattgacgtccgaacttcctcatgccttgagatacttttcctttctcaatcgtccttttcagggcgtctcatgatggccatgaaacgcaaggcttcatcggagggaatcacaaccctcaaacgacatcagaaggataatgtccttgacaattccggtaagtttacgtccacaggtaacgtccaataaagtgatccaatttctgaccattctacagatctgatctaccaggagactcactccgatgcagagtattcggctcctagtactccaagtttaatgagcgaagacatggacgaatctccggcgaccccattctcggccacctcctcccgacaggtatacccatccgagctcaaaaccctatcttgtccgttcgagggctgcgataaggctttcaatcgtccagctcgactccaggagcatatccggtcacacaataacgaaagaatcttcaaatgtgaggttgaggactgcgacaagacattcttacgcccttcccatcttcaacagcatgtcaagagtgctcatacagatattcgagactacgtttgcgactatcggggttgtgggaagagctttgtgaacggatcacggcttcgccggcacgttgctacacacgagggacataacaagtaccgctgtacggagtatccaccttgcgacgagacattccggaagcactcgacgctacagaaacatgtcatggttgcccacttgaaccagaagccatttccatgtgatcacgtggacccaaccaccaaggaaaaatgcaacatggcttttgacaaggctggtaatctacggacccaccagaggagagtccattctgagaaacgattcacatgcgcagaatgtgccgaaaagatggaagctcaatcatcaaatatggccgacgacgatacaaaacaggatgtatcattccccacgtatgccagtctacaaaaccatattcagattgttcaccccccctcatgccctgagtgtccattggtctgttcgacagcacgggggcttcggcgccaccttgagatagcccatggcaatgtcactcttgaagaacgaaagatcttccactgcaccgtccctggatgcgggcgtagcttcaccaagcaaggcaacttgaccgtccatattcgcacagtacaccaaggcgaaaagcggtttgtctgcggcgaaacggatctttcaaactccaacaagctggagggatgggacggcgtcggttgcggcaagcgctatggcaacaagctgacactcgaagaccacatccgcacttcacacttgggtctcccgaatgccaggaaacggcgccaagcgaaaaagacgagcaaaaagccggcgcaggattcagtttccactctttctgccctcacgggccaaggctacgccgaggaaacaggtcgacagatcgcttgcttttaccccggctcgtgcccacatcgtttccatcgcaactacgatttgtgggtccacatgaccaccaaacacagctgcaccgaagatgaggtccagaacctcttcatgcagcgcgcgttgcttacagatgaaaccagcgctggagtcaactcgctgggtatatatggtcttggatatgatcaggatggtcggtcctactgccaacaatcatatgcggcaggagatcactcttcggatgttgctttcggctcacagtcgaacgattcctcctatctccctagccagccggggttggattctgattatttgatggcagatgattctccagcaaggacagcacattcattcttcaatacccagtcgtaatcaaatggcactggttgacactgtttgtgcttaccattagatggaacaatgatgaagggcatttgtacgatgttatgattatctagcgttttgatgcatatccatggacttttcttcaaagttcctatttctcaacagcgtgttgatttgatattttgacttgacatattcaattcaccaaggagcggcttcaaaatgaattccaatgttaatactgatcatctatgtagccttttagacaccgtagcatcaggcctagagatcaggggtaccctcgccttgttatgactggcttatccctacgtggatcttaccctcccagaacgacttcgttgccaatggttgaagctattgcgtgagacggtggattttatgtaatgttctagctcggccaacgcactaaagttcttgatcatagtttatgtcattatagtacttcattgaacgagtgaaagcgaaagaacctgggatatcccatcaaacaaccttccaaggttcgtttcattagctcccgccgtggaactcggacccacttttaatccactttgggtatagctctctattaatttgtacaacaaactctgtaccgtacctatgttgtaggtaaatatggatatagtatcatgtatgtactctgaatatctggctcagaaggagataagcttcggattttgaaagcagactcctacactccggcccaaatccgccgtggatgcagtgaaagaataccctaatcgattacggatttcggaggcaaagtccgcttctacactcaaggggctgaatctgggatagttatgagtgtagtgtatttacaatcaacattcgaataaaagaagtataatctatactatatatctatcatgattcggtagtcatcacagtatcaataccaacaaatccttcactcgaagcacttggccggacatcttctcttgcaatggccgagacgaaatcttccaatttggaaaatcaagatggcgtcgagatgagtgcttccatccataatacagagctcaagcgccaatatccttcgggcctggcggtcactcttatcctgacatcagttactctggcctatttcctctttttccttgatcttgctgtcatttccacggccactccagccattacttctcagtttgactcactagtggacgtcggttggtaattacatatccatttacttgtctaggccacaactgctggtcttttgtcgcttttttccgagatgctgatctctctaggtatggcggcgcttaccagcttggaagtgcaacatttcagcccttgagcggcaagatttacagccgattttccatcaaggtatatcttggttcaagcatcgtgactacgaaagtcaactctgacaagatcatcatatagtggacctttcttgtctttttcgtcatcttcgaagtcggatctgctgtatgcggagcagcgcattcttcggccatgttcatcatcggccgtgttatcgcgggtgttgggtctgctggtgtggccaacggtgcagtaacaaccatctccgccgtcctcccaacacaaaaacaggccctttttatgggactcaacatgggtatgggccaggtgggccttgcaacggggcctattattggaggcgcttttaccacgcatatatcctggcggtggtgtatgtaattccacttcttggggtgatttttaaaatgctgaagtttctatattaggtttttacattaacctccccttgggtgttattgtcggcgggttcttctctttaacacagtgcccgagccaaagcctaaggatccgcccctgcagattcttagctctgccatcaaatctctagatctcccaggattcatgcttatttgcccggccgtcgtcatgttcctcttagggcttcagtttggcggtaaagattatgcctgggatagctcggttgtgattggcttgctagtcggcgctggcgctacctttgttgtcttccttatctgggagtggaaccaaggggacaatgctatggtgccacttgctatgaaataccgagttatttggtcggctgcactgacaatgttctttagcttgtctagtgttcttgttgctgatttctacattgcaatctattttcaggcaatccacgatgacacgcctctaatgagcggtgttcacatgctcccaatcaccctcggtatcgtcctattcactatggtttcaggcaccctgagtaagtgattataattataattttgtccactgatcatcgctaatactagaaagtttccgttttgggctactatctcccatttcttcttgcggggggtgtgatatcatctattggttatggactcttgtcgacattaggtgctaccactccggttgcaaaatgggttgggtaccaaattctttacggtgttggaagcggttgcacgactgcggccgtaagtccgattcttccgaggttgacgaattataaccctatgctaatccgtaccttcaatttagccctatatcgctatacaaagcctcgtggctccagagcagattccccttgctatggccattatcatcttctcgcaaaatattggtgccgccatctctctgatcgctgcgaacgctatctttagcaatagccttcgttcggagcttcaaaaacgcgctgcacaaattagcgtttctccagacgccattatcaatactggagtccgctccatccgtggcctggtgtctggttccgagctggccgctgtgctcgcagcctatgccaaaagcatcgacaaagtcatgtatctcggtattgctgtcagcgtcgccgtgttagttttttctctgggacttggatggaaggatatcaggaaggtgaagcttcagctcattactgaaaaatctcctagtgtaggtgataaagatttggcagtgattggagaaaattagggtcgtttgtcagcaaaagaggtatattcatgcttcttcaatatcctttcggcatgtctaccgacgaggtggtccactggttgttccactgttcttttagagagaatttccttttctaggctgaattcttgtccggacagtttagataacatttaatactacttttcagtcacatgcttcactgtcgataagttgttcgatgcaaaagataataacgggatccgcattcacatttaggtatggggaccatcaggctatcttcgtcggtggcgtccctttcgttcttgtgtgcacttgcatgtttatttgaccaacaagacatacctaagtgagaaggtttgatattatagcatgaaaagttactattgtatgtaattttgcatgagtatataattgatcctgtactgctttaactaaactttatcctgcaaactgggtatcctttttcactaagctaaagcattacgacaagtttctttttcgaaacaccctttctctgatggagagcctcttggatattatctagccttttgcccacaagatgcggaggaggaggtggcacaaactggccttggtcaagtgcccgtggtaggaaatccatgtagatatgagagacgacgctatcggggtcaactaggccattgagaagaccgaatttggcattcactccggtcctgatgcgcgtctcgatcgatttgattataccccccatcatgccgatcaagtacgtgcctttgccaacaaatgtcgtgagattctcggaagatatgatggcgcccgccacagtaatgaatttccgagtgagtttaggataatgtgtcttcataaccgcagtgcatgcctcagcagcaccactgccaattgtgtaggcgccaaccagcttgtggccttgcagagcaacgaggaggtccttgaccaaacttttgctcctgtagtcgaagactttagtggcaccgagacctttgaacaggaaatggccaatggtttgaagatgtactactaggtatgccacgacatttactagtttattgtaaatgatttggagcctccagagacgactagtgccactcgggagaacatctcaccttttatatgggtttagtcctcgaccgacaaatcaatgctcggatttttacagagagcctccgatcatcaatacgaaaaaggaaaagtgtcaataaccttgaaataaccttatttccccaacgggcattattaaccgtggaaccccaccgacacgttcaaggttgttgtatagagcggggtccagatgaaaaagaatcgcacctctaaatccctgccacatggcggatctgcattttttaaagtacctatgacgcgttggtcggatctccatgggggccatgctgatcttatgctgcaggtcagcaaatcttggatttgatctatgccaagactgcgaccggctagtataagacattgtaccgagtacgtattatatacaccatttgtattccgtacaaactagttaattaagttccaagtttatccgagcaaagattgtggctggatctaatgcaggaggtcccggagtaaattgaaatgatggttagctacttatgtactgtagttgagcatggacttcaatggtcggtgaaaaggcatagcgtgttcatgcggacccataggaaacgcaaggaaggcaacgtgtgagggtcaatgggcagaatttgccaagccaagctcacttccgtcgagagccagtagcgcggatgccagccttggccacgatgggaagtcttgtagaattaaggggggaaattgggaaaggagatactatttagaaatacgttgtataactcaggggaataataacatagttgccttatactagtcctctgtgctctgtactccgtagttctaacataagacatcctatatttatccacccatgcaaactagtctacttatagtcggcttgtctctccaccgatgatccaaggggataacgccaatgaaaaacctttgttcaaggtctcaatgcaaagagaaagaaaaataaaacaaagcagatattggcttggcttcagcttttcaagtgtcgcacgagacaataagtatatcattggtgtagcgtggaaatgttggaaggtcttctcttcgcctccgggacttgccccaactgatccacagtagttcttggtcttctctctctatcttctcttcaaacctccctattattccatatcccattcctccacctctctcttttgctggaaattttttaaaaaaggacccgttaatcccggtgattagcgacgtattcggcttgtaacgtcatcttccttggcaaagaagctcgacttccctaacctccaacccaaccactcgtttttttttttttcattcttattcttccaggttcacccttgtgtggattctatggattgatctcttcgtcgccgaattcggtctaggcgcagtcgctatttcacagtctctcgttcagcgcaatcgacctgcctcggccagtttccttttaaatcctaccacgccccagtctctctccttacctgcaaggcgtttcacagtctaactcggtgaggggtaatactcaaaagactactgagcttcttgtccgcacttcacgttccgacgtcatgggtcgttcgcgtggtaagtcgatcctctccgggtatgccgggaatggcactagagcccgttattgactctcccttgcgtggaactagtccgctcgttcctattcagttttgggggttcaaagaatcatgcttctgggaaagagagcaaaaaattgtcgagcaacgttacgccggtggccaacgtggccaacgtaacctcgtccgatacaccaccccagtggcaaacccctcccgatacaccatcccctcctcccgaagcatcccctgtgagctcaggaccaagaggcggaaatgcgtcgcgaccggcatctatgatcttctcacggaacccgcctctcatgcatcagacgggcgataccccaccggagctgtcgccaatcttttcgttcctcaatatccacacgaataagctatatcatgaaggatactttttaaaattgaatgatctggattctcgtaagcgatcgctggccttggtgcattgcggggcaagggctaacacgtggcagatggacggccttctggtgatcgacaatgggtggaatgctacgcacagctggtcggaactgttctttcactatgggatggcgctgcgctggacgcagcaggtggagaagaggttccggctacctttatcaatttggccgatgcggctctcaaaatggtaagccttacctgtctgaatcgtcaggcatggactaatcagttactcgcagattgagactcttccgattcaaaatggagctatagaaccgttgaagaacgtactcagcctttcttccgctggcaaaaatcgatacctcttgcatttcaattctttcaactcattgacccaatggactgcggcgattcgtctctccatgttcgagcacacatctttgtacgaagcttataccggttctttgattgcagcgaaaggtagaacactcaacggaatcaactccatcttggcacccaccaaattcaagtacgaagattgggcgcgtgtacgatttggagcaggaaccccgtggagaaggtgctggtttgtgatctgcccgccagatgaaaaagagctccacaaagcgcggaaaatcatgaaaaaatcggcatatgaccgcttgtcaatgccagttaccggcaacatcaagttctacgagacgaagaaaactaaaaaggtgactcccattgcaacggttactcaggtttactcggcatatgcggtttatccacaatctacggctataattgatgcatcgaccctggtgaagttggaaggacggattaccacacattcgcctgattcttcttcggagggacttgtctttatcatgcctgagccacatcctgcggtttctggattcgagatgatgctgcgcttccttttcccgacgttcgacactttcaatctctatggccgtcctactcgcctggtggcagacactaatcacatcaagagcatcatgtttgccttccccaaggagcgacggtacggctatcttgatgtgctggacattgccaaccttcttcaaaccccgggaagccaagaatggagcgaagctcagtggagaaaacagctcaaagaggcaacacagcgtcgaatctcgtctggtaggagcagaaccaatagtgtcaacagcgtgagacctcgttatcgctcgatgtctggccgacacagtgatatccctgtggactccactcggcgccagtatgctgatctcgaccacaagcctgggttcaaccactccaccgaggctatcattcatgaagtccctcaaaacgaggacttgcccgctgtgtatgaccgcccggtttctgataacacaggcttcaacactggctctcggctaggccatgaatctttaatcgagagctcacctcactcatctgctcaagatctgatgcaccgtggtgttccagcgttcgatcctatcgctgagagcaccagttccggaagcgaaccaaatatcaaccacctccgaggcccgccagttgaagaacagctccccccacgaaccccaccggctcctgttgaaaacccacccccattttcccatggacccagagagatgcccactaaccggccagaggcttcttcggagcagaggttggcaaacaaccggatgtctcacgcaacactttcccaactcacatcggtcggaactatgggaatgagcgcggcagccgccactgctgcatggaaaacccaccagccccaggatagggccttcaacggtgtctataagcctggaccgattgtctccgcaaactctgttgcaacttcatcgagtgatgaggatatcagtcttgctcttccggttcgacctccctcagttcctgagcatcgtccgatcacacctagtactggcagcccacatcggccttctccccagcagcactctcctcaacggatgcacattgatgccaacaaatctgtgcgacgcaagccactccctcaacaacagattttcgggacagagccagagtcaccagacgaaccgagttatgatgatcttcgccatacccttgatgaagatgcgctgaataaaattgcgcctcatcttccatccccagcgtcatctgttggaaatagaaacggaaacgaggacgacagcatttacgatgatgcatcgacagtttcgcctgactatgctagcacacacggttctgtctacagcaagaaatccgtcgcatccaccaaacctagaatgggtgtcatgaaaactgtgggagtcccagcagtcaaagattatgtcattggcgatgctcattatactatggataagcccccgacctcgaatccggatattcccagtgttgacttcggcccaactatgacatatatgcctactactgggcgcccaaccacatcagataccctgagaagaacaatgcatcaacgtaatgattcgtcggggaccaaaattgcggttccgactcaagcaatcgatcaggctaatgcgcggccttccagtcgcgaagaatatcgacgcagcatgctgtggcagcctggaatggcttctcgccctgtcactccaggtggaggtctaaccccggagcagtacgtgcagcaacgggcggcacccagtcctccggtgcaggtccacaatcgcaccccttctaatcccatgtcagtacaacgcccggtatctggcgactggacacataatgtccgttccaattcgcccatgagccctcagcgggatcccaattatcgaccttcgtctcgtggtgcccaaggtatcctcaattacaatgatgcttcaaccaatctttccgctcgtgaacaggagcacgttgcccgcatgactggctcttcgttcttcaatatgtcaaatgacaaccgaaaaccacaggcgccagtaagccccatgggccttgtctcgcacatcgatgctcgggagcgcgagaagcgtgaaataagggagggaatgtcgaaccaggcggttcaacaggccattgcccaccgtcagcaacacatgatgcaacagcagcagtacgcgcctcagcagttcgcgccgccgttctcgccgccgttctcaccgccattctcacctcaacagatgcagacccaacaggctggctctgtgtatccatctcaacatggtcgccacgagtccatgtacaacattccggttgccagccacacatgggatgctctaaaccagacaatccgccccgacgaaccccgtcgatcgtcctggtacggacagctggctcctcaaacaccgcctagctatcaacaagaccagtatggtcaagaaccgaggtactacagccatgctcaatagaccggttctttcccttgggtctgacctatcattttgtcactacctcgactttcctttcgattttttcaacaacttattccctgcatattatcagcagcatcaatttctattctgttcaaatcgccattcctgcatacataccaacctttgcacctggcttccaacgcgttcatctttcacgcagtccttctcttttcgccctctaacatcactcattatttttcctttatctctcattgcttctttgcatcacgcatccaatcggagttccagatgggcgtggtgggatcgtccctgatttttcatgcgaatcgcttgcttacttatcattatcggggtccttgcttttactttttattcacatgttttgtgccagcatgtagatcagactcgtggaaatatgtggcctgtatgtacgccgtatagattgatcatggataccatacccaaccaggtactatttgtcctttccatatctgcattctttctattgttctctaaagtaagcattttgtagtagtaagaggtatgtacgcacatcgtaaacgatagttgcattcaaatgacatagaagatgggaaagaaaagaccttactacgctgtgaagcatattttccgaacgcaatcaagcaggatgtcactttacaaccggaatatctagtactccaatcatgtttcttttcaaacctcgctaccaatgtaggacatgctacaatatacagaattttagtgaggcttgtaagctacgacatccttctacatcctattagttcgccatatcaattccacgctccacacacacagttcagttcatacaatgataggtggtacgcccggaaggcgagcgcaaaaccggcctgatcaggggaaccctgttaccaatcaggatcaagtagactgtatctacggagctgtacattgtatgatgacaattattttgatatagaaacatcactgagcgtccttaatcggtttacgctatgctggtctgcgctacaacatagtctggtgtgatgtaaccttgtatatctatagtgccttgaatgatagtcgggtacaacgggtgtagagaatatatttttctattatacacttcttgtcgtgctatcaaccgttcttgccagggataaatgatttatacattcacagtatatatatggataatttcggtgaatccaatgggactacttaacccggagaaaaccttatgacagcacttctccacctaaccctctgtcttatctgtgaattgaacatgaagaaacatatgattgaacatagagactgacatttgacgtaacctccagggctctaatgacgtaatggagaacattggaatactggggaacaggttttccccggtttatagtggatttaatctagagatggttggatttaattggatacctgaccttgcttgtatatagaagtacacaaatcctagtgatagtgtcgaacggtcaggtcgccatcggaggtatatgagagcagtgtccgccacttctttacatactaatagccaccctgatatcatctgttgtgcaatttgcatgcatagaataagccatttgtttattcattctctatgtaccgttgtggacccaatatctatataatagacttaatcgactgcccgaatggaccgttcagtccccgaaaatcccgaagcgtcgagcttcaaggatgaagccagcccacaagcaattaagaccgaagcaggacggggtgccgatacccacgctgaatatgcctccaactccgatacagcaagccaagaagacaaacctaagctgcgtactggtggcaagcccgagctaacagaagatgactgctacgaaaagctcggcttctgcttcccaacatggaagaaatggatgattctctccgttattttcgcggttcaaatgtccatgaacttcaacacaggcgtctactccaacgccgtccccggcctgaccgaagaatttcatatcagcgaacaagccgcgcgagttgggcagtgtgtgtttctagttgcatatgcattcggatgtgagctgtgggcaccatggagtgaggaattcggccgctggcccatcatgcagctctcacttctttttgtgaacatttggcaaatcccatgcgccctcgcaccaaactacggcacaattgtcgtatgccgtgtcctcggcggtctcagttctgccggaggctcagtcaccctcggcatgacggcggatatgtgggaagccgacgatcaaggcttcgcggtagcctttgttgttctctcgtccgtaggcgggtcaaccgtcggacccttcttcggcggtatgatcggccaatggctcacatggcactgggtattctggatccaattgatcgtcggaggtgtaacccagattctgcacttcttcatcgtgccggaaacacgcacgacaattcttatcgaccgtgaagcgaaacggcgtcgtaagaatggagaggatatctggggcccggacgaactgaaaaccccgcgcctggactatcacgacgtactacggatctggatccggccattcgtgatgttcgtccgcgagccaatcgtccttttcctttccctgctgtcgggtttctccgacgccttaatcttcgtcttcaccgagtccttcgcattagtctttgcacaatggtcatttagcgttctagccatcggtctaacctttgcctcaatcctaatcggctacataatagcatacgtaatttatttgcccgacattcaccggcaaatccaaacacggcgccaatacggcacagccagccgtctcgccgagcgccgtctcctccttctcctcttcattgcacccctcgaaccaatcggcctactcggcttcgcctggacatcaaccggcccaccaatcccatggatcgcgccgtgcatcttcgcctgtctgatcgcaatggcaaattatgcaatctacatggcgacgatagactacatggttgcggcgtacgggccgtactctgcgtctgcaacgggaggtaatggctttgcgagagacttcctagctggtatcgcgaccatgtactccacgcccatgtaccagaacattgggaaaaggtatcatctccagtgggcgagtacgctgctaggctgtgtgggcttcttggtcttaattccgatttatgtgttctactggaagggcccggatattagggctaagagtaaattcgcgcagcagcttgctgctgatcgggagaggaatactgagagtaggagggctagtcgggctagggcttcggttggggcataattgtgcttgtggttgctgtatgatattcagcctttgtatagttgtatagttgctagatgcatatattggatagatgtgttatttcgtgagtcctactcttatgttgtagctttgagatgtactatcaaaaactcggttctgcttcttctagaaatatatattggaacagcagatccgcaatggcatcatgaaagagagagcgttcccatcccaggaacgtggggaagtatacatccgaaagaggaaagtggaccacgacacgtgctagtatacaaccaatgcatgctgcccctatgtcgtatgtagttgcgaattgcaaaaaatgtacttctcaatcacattcgttattgatggatgaatagttactcttagcccataatagcgtaatggcaaaacagttataaaggtatctcaagaacgccacaagtgccagcttccctcgcttccacgatgcttcaactccctttccactaggaaaagtgtctagctcatgctaggatatataatcctatgcaaagagatgtttcgtaaatcctatattatctctgactagatattgacatctagctcgaatgcagcttcttgacgcgcatagcaccttcatacagaccgcggtccaaagcggcagcgacagttaaagtaccaccaatgatagcacagacaccagtaaggaagttagtgaaagtcttcgggcgagcctcacggttgacaaccttcataggagagatatcgtaattgaagaagacgcctggaataccgccaccggcgtgcacgcgttccttgtggccctccgcagcatcatttccaccggaaagaggacgcttgtgcgaggttaccgagtactgatgagcctcgatactaccctgagtaccgtatgcgaggccgtgggagccaagaggcgcactgtcgtaggcgttgtgtatggcagtcgagaactgaggatcccagcctagaggtaagtaggacgtcgagacaaccttgacaaagtacatgaagttgtaggcgggttcgtcggtctcctgcttggtatcgtcgagtgggttggtgttgtggtggtctgtccacccccagcggcctgcgagctcggcggggagcttgggcccgaagcgaagctcgtggacgaagtgggacattgtgtgctggtccgccgggcccgcgttgggcgcgatgtaggcgtcgagatcgtggacatgcatgttgccagtggtgaagctgcggcctggtgcaatgtggaagttgcccacaaccttgttgaccttcagcacaccctcaatccgacatccctcacggcgctgctcagcgagtttctcggcatatccttcgcgcttgcattgctcgatgttgctgccatcgccaaaggcccattgcttctcggcgtaggcttcacgcacttcctcacaagtagtacagcatcccggtttgatgacggttgggggaggtgttgctccaccacattcaccgcaatagtctggagccagatgcttcgcggcgtctgatggagagtgtctggggaaggaagataatgagtttgcgatcgcggtgtgaaggatttcggggtggcaggactggcacttacaggtccaaagcctggacatcaatcactttgccgccttcatcgcgtgggcttaggcggactttgctcacgccatgggcaacgccgacctgctgctcaccagagacatccatcacgtccaaagtcaacagctcacatggcaaccgagggaaggtcatgttcaagtgaatctccattcgctctcctgcgcagcaaaattttattgttagcgaccttgccgaccttgccctatgcattgtatcttctgcaggtccatcgtggatccgatcgagcccaaactctattcatacctcgcgatttatcgacgacaagctccggcagcaccacaactctccggtagtcggcccattcaccccataccagccacataacaatcaataacgaagcaattgtaatgacacctccggagttcgtgcgaatacgagcatcttcaacggtcttggcgaaggcatctagcctcgtgaatcgcgactttgcggacatctcgccggtcaattgaagaccataaggtgaagcgcaaaggccaggcaagggtttgtggacagcggctgtatgtcaaatgtctgtaagacagataacgcgaataggtcagctaggtggtcattggacgcgcaagctctattagtgagagagaccaccaaacaaacataacagagtaaaggaaatagggaaggcacccataccaacaatagagtccgatgagtcagttcaaactcaatgcgattgagtattccaagcacctgacaatagagacaagagcaaggctaatttgaagcctcaagtggccaggcatacttgcatggccgatggatgtatgaggagcgtgaggacagacgacagcatgtgattggtcaccccagagcaaggagatgagtcatctcctaattaggcctagtaactgacaatgccgcctcatcacgtgccaatcgtcactttttctttgaactcactttacttattcacggccctattgttctttggtcattcactttcactttcttattgtcttgcagctgcactacataatctgcagtcccccctcttctccagtcttttcagtttgctttttctttacctcccaccttcccgagtcatatctccattgcgatttcctcacatgcgaactacttctttctgcctgatctgaggcgcatagcgcgctgctctcttcaccttgatcgtttcacctttctttcacctttcctccctttgcaacaatctccgataccccaccaacctctcaaatctctcctccaactacgatgaagagcatgaagtcccgccgcggcggcaatgatcgcgggggaatccgcaagcggggccctactcgcaccgaccgggatggcgacatggatatggattcgggcagtgcgcgtgcaaagagaacccgtgctgagaaatctgccttgggtggccgtgccgccggcacaggcgtaggtggccgagctactggaattagcaaccgggcccaggctcgtaccaagcacagggattcggatctttttgagagagcggtttacagcaacaatggccaagcaaacgttataagtggcaacaagaaaacgggcggcgatctggaacagtttagtgtccgaggatggaaatcaagcaaggcggcgagcaaccgtgatggcggccttgagagcctcattgcattccttgaacgtcgcatgaactcattcatcaaatccggacctcgcgccaagattacaaaggtatgttcctcgttcacaatagcggtcaccaacatcgattctcgacgtcccccgcttcagtgtcctcttgttttcgaggacgatcctcctacaaatcgacgatcgacacattttgggctttttggtttctttccctttgggtgaccgtagttttcaaggtccttcgcacctttctaactttcaaattagtcgcgcactgaaggtgacactctcgtggccttcgttcgacctgatctggcgggtcacatgcttcgaatcaacaacaatgttttcgccggagcccatgttactgttgaagaatacaccgctgccaccgcactcgatcaggaactggctgcagccgaccccgttcctggctcgaccgccgataccaagactaagatgacaactatcctcggcaagcgcttcttccctgctaccaagctacttgacttgtcgaagctgttggacgaccctgatctgcaagccatgggaatcttccacaacgtctctaccaagtccaaattcttccctgctctcatgaaggtctgggaactgggcttcaagactgtagctgaacgacgtgaagcggtcgaaagtgtcagtctggcggaaaacaacctcagcaacatcagctctgtgactaccctcgcacagtctttccccgatatccaacacttggacctctcaaagaacaacatcaaaaattcgcaggcgatgatcggatggcggtggaagttccgcaacctagttttcctcgacttgactgaaaacgaaatcagttccgacccgactttcaaggacaccatgctcaagtggtatcccaagctgcaaactttaaataacgtccaagtgcgaactccagaggaagtcgcggctcagaagaagacaccgatccccgtcctgcctcctcacttcattgacgaatctcaagtcggcgagaatttcgttcgtgctttcttccctggatatgataacgatcgtaacagcctcgtcagcagtgtctacgatgatcagtccactttctcgttgaatgtaaacaccacggctccccgggccactcaaaccgagacggcaggttggggtgaatacatcagaaagagccgaaatcttgacaagatcagccatctttctgcacggatgtcacgatccttcaagggcattgagaaaatccgtgaagttttcaatgagctcccgcccactcgccaccctgatcttatcgcaaaggcagagcaatggctcattgaatgccacccagtccctcatctccccgaccctactggacagagccccactggcgttggtggcctttccctcatggtgcatggacaacttgaggagagcattggtggcaagattgagatccgaagcttcgaccgaacctttattcttggccccggtaacactcccggtggcatccgagttgtcagcgagattttctgcctacgcgcttacggtggacacgaggcgtggtcgcctgagatccaggcactttcccaaattcctcagattgcagctcccgttcctattcccactgcggctcctacaccccttgcagtccccgcagctgtcccaggtggcaatgttcctgagggatacggtttgccccgacctggaaaatccgacacccagctccagcaggagcagatgatcactcagatgagtggcaagtcgggcatgactttcgaatactcagagatggccctcgcgggtaatggctggaatgtcgagcttgcttggaagaacttcgaacagctcaaggtaagctaattccgaggatggctccctgatttaccaaggaatgataactaacgaagctctacaacaggcaaccaacgcacttcctcccaccgcttttattgctccggcgtgagctttcactgtcatctggtttcattgaaatcttccacgtccactcccacttccattgttgttagctagtcagttttatctcgggagtggttctgtggaagctaatgtatctgatgtgaccatacttttttttacttgcatggcttgggcgaatggcactggtttgatagtctccaaatctggacatgggccactaggccagggacttttatgaaaacccaaaaaaaaccaatcaaatgaatccccttctaatatctcactcaggatataagtaacaaactgtagacctcagaatcacaagggttgtctctaaatacccaacaaaccagccctgtaaggattgcggtagttgcggaagatgccaagctggcgcgctagagccatgcgggccgcgatcaacatcccccattcaacttctccctcccacgaattccgcattggcctcacaaaaagcaagttgagaccaagggcaggatgattctggtaggctgatggaatgacgatcactgccacaaccaccggccacatgtcgccaaacgaggaaccaagcctcgacgccttggatgcgggtgcggaacaattgacatttcgttctcactgttgtgtatgctgacataggagtacatccagtggactacgatccgattgaacacttgaatgccgttttctcccatccatccaccctctcctccgtttctcagattgccgacgccctgaacaaatgcgaagatgagctggacgatgacatcggcatgctggtggaggagcaggtcacctccaatgccggtagcgtggaacgaatccaggcagctaaagacgacctgtcggagctgttcaagaagatcgatgacgtgcgtgagcgcgcattgaagaccgagcaggcaatcaccgaaatgacagccgacatcaagcaattagacaacgcaaagaagaaccttacactatcgatgacggcgcttaagcgcctgcaaatgctgactacggcgtatgaccagctccaagctctcagtcggacgcgacagtatggagaatgtgcacagctactccaagctgtcattcagctcatggcccatttcaagtcgtaccgatcgattgaccaaatcgcaatgctcagtcggaatgtcgcggatatacaacgagacctccaagagcaggtctgtgaggacttcgagctggccttcgccaagggggaggtaggctcgaagcgtgcgatgctcgcggagtcgtgtctagtcgcagatgctctgggtgagcacgcacggtcccgactggtgacttggtattgcaatacacagctccgcgaataccggcaggtcttccggaacaatgaggaggctggatcattggataacatctcccgccgatattcatggttccggcgcatattgaaaatatatgacgaagagaatgcggctatcttcccggcttcgtggagggtaaatgaggtattagccaatgtcttctgcgagggtacacgggatgatttcaagggtatcttatcccgatctgtacgcagcgggcagacgatcgatgtgaatttgctcctctcgtgcttgcaagagacactcgatttcgagcattctcttgagcgccgcttcgccccttcgtcgcgtgtatctgttgatacatttgcctctgccgaactgcctgtattcaaagagtcaatttccgaagccttcgagccatacctcagtgtctgggtcgaggctcaagacaaacaactcgcagccctgctaccgaaataccgccagcaacctctcaaagtaccggacgaggagttcaactcgcatattgtgatttcatcttcgactgagcttttcactttctatcggcacgctttgcaacaatgtgctaagctttcaaccggtggcagtctagcagagctggccaaggtgttcgccaaatatctagaccgatacgcccaggaggtccttctcaattatataagtgaacgaccaacacttcacacgccgtctagggtgccatcggtagaggattacgtctcagtcttgaacactgctgattactgctatacgacttgctcccaactggaagagaagattaggggtagattggatgagaacctgaagcaatccgtggatctgcaaagccaggcggactctttcatgggcattgcgtctgctgcagtacgaggccttgtgcgacaagtcgaagttgatctcgagccctcctggcgcgaaatgcgcaatacaccttggtctaaaattgaggcagtcagtgatcagagctcatatatgggcgagatgctctcccggacgaaggagaaggcaactgggattttacagttgttgcataagcagcaatatgcgcgtgccttctctgatcatctggtggagctcatgtcgagccagttcattagcaatgtcttccaatgcagaccgctttcagaaactggcgcagaacaggtatgatgtcccttcggcgatgtaattgtatatcttactaactccattcatagatgcttctcgattcgtatactctcaaaagcggcctttcatccctgctacctgctccagcgcccgccggctttgtcaagcgtgtgaacagcagcttcttcaaaatcgaaactctcctcaaaaccctccaggtccggccgtcaccaccggaagctcttgtgcaagcatacctcatccacattgctgaccgcaacaacaccaacttccgcaaaatacttgatctcaaaggcatccgcagccgccaagatcaaaatcaccttgtggagctttttaatcttcaccgtgcatcagatcgctatgcatccagccttcaacagagcaacccaatactcgccgctctccaaggaccatctactaccaccaccggttccgtatctcaaggcctaggtctaggcagtgccgccgcggccatgccctctcgttttgacgcctccatgctcggctctgccatcatgtccgctgccaaagacggtgtcgaccgcttcggaaaccccaatctgagtatgggtcctggtgcggctggggctactgggacagctacatctacatctggcgtaaccagcccatcaggcaccttatccccttccctggccagctccagcctacaatcgaatcccatgcacacgccaacagaaagcaccaccggaaatctcaacgagaacctcaagaacattggtaaattcttccgccgcgatctcggcggggttttgggggcgggtgggggggnnnnnnnnnnnnnnnnnnnnnnnnnnnnnnnnnnnnnnnnnnnnnnnnnnnnnnnnnnnnnnnnnnnnnnnnnnnnnnnnnnnnnnnnnnnnnnnnnnnnnnnnnnnnnnnnnnnnnnnnnnnnnnnnnnnnnnnnnnnnnnnnnnnnnnnnnnnnnnnnnnnnnnnnnnnnnnnnnnnncgccacggcgtcgggggttttggcggccggttcgggcggagcaatgaggatggggtgtagcttctccccatctattttcattacgtcttctatttttttctggttctgttttgactcgggcgtggatacaccattgtaaaaatgttctttgccgtttcggtcgatttgtccgagccattgaatgcccgaaggagtagcttgtttatgtatcagagcgccctgtgttgaccttatgttttgcagttgtataccacttggattgaatgcattaaatgcgacatctgtgttatttggatctaatttgtctatattcttctagtacacatatcccctggtgtgggacagtttggttcgaaaatatttattctcttttagtccacgtccttctaatgacatggctctacaaaatataatatctatatctcttctccatagtcacccacaacccctcccttttcctattccaagaaaaccccaactcggcaaaacatgaattccgcaacctcccaaccccggggacataccctccgcacccaccgacatgtaaccctatacgaagaagaacagggctgggcacaaatggaagcactagtatttaaagtggtgcagaattcctcgacaactacgacgcatccacagaccgatgctagatcttcgagcgcaacggcgtttctcggccgtatagtaatatgcaagtcagaaacagactacaagaaatgagatatagatgaaagtcaacaggtgagtttcagctggcctctcacccatttagagttaaatcctctaaaatcttgggtcaaagtcctcaattatagtaggaccctggacggtatgtcttaaacacatgtgaaaaccctgcgccaacctgagcttctgcgtcctcaataaacgcaggagtaagcgtgatacatccagtacatcttacaaaaataatcagacctcaaggatgattcctctttgcgtgtacctgcggtctgctcctccgcctcttcgcgcattcgtaagagatctgcccggtttttgctcataccactcgatatcctctggataattcgttacgcgccctaggaatcgctcaagaacacaagcaacatatgcattctcaaaaacccttcctctttgaggactagcgagtggggtccaataactttagaaatatccacggattcgttccagagcgtttgcgttgtagatcgtgcgggtctataccccgtccgtacctttttatgctttatagccggtggcgtaccggcagagggagtctagaagtagtgggtcgaggatacatagcatcaatttgttactacgtgggctaggcgggcgcgtacatctgcaacccctctctagcgcggttataacagtagggttaacattcgatctataagcgacagagatggcaggtaggaaagaatagcgaaaatgcgataatcaaaacaaattctctgcgtaacgtcccaagattcaaccactggcgaatgaggcgtttgcgccgctggtcgaatagtttgttatgcgagtctagataagcagtatcccattattcctagaaatgggaatcgagttgatagcgcatgaaacattaggagaggagtcacatatactgtatagatgtcgagtggaagagccccctatgcgggaacccgacgttagatataagggggcattgtggcgcatatctacgtcacagaaacggagagagactgactgaagcattggagttatcaagtcctttggcgatgactctggtgggaacaaatgatggccttttccggactgaacctaggtcccagggctggtcaataggttaaagaagggtgtaaattgtaggatagctgtggattctcgaaagacttcttctgtgctgactgtttcaggctgcctcttcgtctccattcagggccttggtgtgtaagagtctttggtacctttcatattttcttaactacatgtgctttcccaccttctaccgaataggacaacaagctataggaatagatatgttcccctcccatcatgatacttctatatgtagtccccggggaggcgcccgaaacagatcgtccaacggggatacctagaggctagaaccctgacaggtttcgccgaagatccggcaggtgggccgggacctggcggacaatgcttgtgacaacaccgtaatgcttgctttattcattttggttcagactggtgaaatagatgttcatacttttctttactcattattcagccttgaaagtattgtattagacgatcaattagaaccaaggctacagggctgtagatataaagaccaaagtatggaacaacattccatggtctcaaccagaggtctccctacgcgtgggtctcttctccaacgacacattattctacttctagcgattttgtgcagagaaggccaccgcgaggagaagattttcctattcgggtcgttttcgttttcgcgagtatcaactgaacccttgatctccacttccttctgctggacaattttattatgtggggccgatttcatctaaatgatcagcatccgaagcaataaccgctttggtgcagattctggagagtctgaaacaccatacaatcaagggaccaatgtacaatgttgtaagcaattgaataggggcgcgtagctcatacattgccttctatataagatgggtagggagctgtcttattctctgtttccagcaataccagcactccatcttcttcacccttccacttctctttttttgccatgtttcccatcgccgttttagcactggttgctaccgcccaggcacacacagtcgcctggaccaaaggcatgtactgctctgggggccctgatctttctaccgtcaacctcaataccaacacagcagtggggcccctttataacctcgccaaggaggactggtggttccaacacgaacgtggatgcgatgcagcaccgccgcaggacggcgaggttctcgaactccctgctggtggaagcttcaccgtcgagctcgcccataaccgggcgcagactacactgtcatacggtggacagtacgcctctgattggccggatggaaaggatcacccagaagactgggcaggtcctggaagtccgccagactgcatccaggatgacggtgcaatgcacaccaacaaccaatccatggctgctggtaccgcgtttgcgatcagctatcagtcagatctagccgatgtcacaatcgacaacttggccgtattcacggtcttggagcagtaagtatctttcaagagatgggtgcgtgaaatgattgaagttctaacctacatcttaagcaccccgtggaaacgtatcgctacctatgaagttccagcggatcttcctgcctgccctgagggtggctgcacctgtgcttggctctgggtaagtggatggatcaagtataccacgatataaactaacgcatttgcaggtgccgaacggctgcggacaacctaacatgcaagtatatgttgtcacagtgtaggattttgactgctaactcgaaaactaggtacatggctggctacaagtgcaatgtgacgggctcaacatcatccaagcaggttgcacctgctcaagtcgcggcttattgcgaaggtgactcgaccaagtgtgtcaagggcgccaagcagatgattgctttcaaccgtaagatatttgaatctttagtcgcactttttttatacagttgactgactcgagcagaacaaaccggaaacaacgttcaagtgcccaatggcaagacaccgatgtacaacacggcctggggttgggaatcaggtatgtgttcattccggacgactcttcagcaatgataaaaagtaatgacaaattcttacatcgacaggtgcccaaaatgatattttcgtgtgatcagggccaggtagtcatagcaagcagcttgttcatgaggtgattgtcacgatccacatggatcgctgggtcatatgcttcatgtttgcttgctcgctcgtttgcttgcttgtttactatatagtctgctggcttgtattccatagattgtttgttagatagccaagcgagaaggttggttgttggcaacgtttgcaaagggacagctatattaactggctgcttcctactttgcaacttgcttcttctttctctctatcttagttattttgaatagaatgcactctgcttcctttgcaagatctggcacgtcacagtggcgaggaaatacaggacggaagatagaagggaaatgaggaatattttataaggatggttgaatgatggacaggcaattaaatatagtgtttacctagtcgaatgcagtacttgatcttgttcttcctatagttcctcggtaatctctatgggagtcgggatacaccagctctatttaagcttaatgaactaaaatatgtcgtatgtcttattcagtacgccacaagactgtatgtacagtgtttacctattatatactaaattccatcaacggcttgaattatttccaaacgtccggatatattgggattctcccgagcccaaagcagggccatgaggctcggaacctcacattaggtaaatgaaaggcagagaagagtacgctgagcccacaccaatgcacccgctttcctcgtaatctagaggatggtcactcttgactacaattacccgggagaagatgaatttgaaggagattctggtgggattggatccctatctgactacgccatgctgaagaacctacttgataggtgttacagacgatgatttacctacccaaagtcccgttcgtattgttgcttctagcctctttggagcgactatatatagcgggggtgtatgtttgccgtgtacatatcctgattgaagtaccaaaaaatcttgtttctgtcttaataaatcgcttccctcaactgaaaatgattggaatcgaaggagactgggatacgccgccaatggataaagagatgtacgacaggacttcagaaattagatgtaccgttccatatccgtcatgtgatatggaagactggcaacgaggaagagaggtagcagacgaggactattgggccaatgaggacaatcttagcaaggagcattcgtctatgtagatcgatagctgggtattgaggctctaagtagcattgttgccgaggtaaggaggaactgtcacgtcacgccacgaacgtggtgtctttcgatttttacccgaatagtccacaggaactcatcgcgccacgatgtagctacgagacagacacaccttcatattacctattgtacactagtcaacataccttccactgaagttcacaggacgaccttgcaagtcccacagaggaccttgaggacttctaaggaagctatctcgtcgcactcccccccctcttctcttcactcttacgacttacacgcacgactaccaacatatctcataccaaacaaaccatccaaaggatgagcaaataaatgcattggaacgaaaacatacaatgtctattcaagggtcatcatcgaggctaacaaaaaaaagcacgaatccatcatggtcacggcgcccctcctagaacttcgtcctagaacgaagctagcatgggcaacatgaacctgttagatccgttcgcaagagccaggcccgcgatcgtggtctcatctcatccatcttcgattcatgactctttcccattgtcagcgcaactccccacacaaaccccggtgcccatggaaaaataaaatgggcgacagacgtgaaaaagcaatggaaaagcaaggatcaaggacccgaaacgtgtatgcaagagggaaaaaaaaaagttggacaaggcgcggagggattggaaacaggattacaggagaaattgggaaatggaatccgagaagacaaagagaaagaaaaaaaagagaaattgatatcttccaggttttcggaggaaacgccattgcaaagcataaagaaaacaaacaggttccccgcgttaaatcggggttaaggagaggggccccttcacatggtatcataagcgaagtcttcatcaatggcctagcatcaacccccatttacggcatggaaattatctccgaaacccttttactgcgaagcgcactgcacccgctcggcaccgccgggcacatcatcttcatcctcgtccatgccggtcgcggccgcgccgtgggcgcgggcctggtcgtgctcgttcgcggggtcctcaagctcgaaatcctcgaccatagcgtcggttgggggcacgatcttctcagagcgaggaggaaggaccttctccaagaggtctaggttctggagctcttccttcttcgggaacttgacatcgaacttgatgtataggttgccgtggtcgtggtggcggaacgagggcataccctggccgtgaataaccttgatggcatctgagaggaattgttagtaacaagtttcacaatatctgtggggaaaagcaaggcaagtcacataccaggaacgataacctcgccagggacaatgttcacggtcaaccaccgctcatcaaggtgttcaatgtggatggcaccgccggcaagggcggtaagcaagtcgatctcagcctggtagaacaggtcgtcgcccttgcgctggaagcgggggtggggcttctgctcaatctcgaaaacgacatcaccgggcatgacaccaggcatctggtcaccctcgccgcggaattcaatcttgtggccgtcccgcacacctttgtcgacgtgaacgtgaagcaccttgcgctcaacgacggttttcttgccgttacacttcttgcagcgatccttatcacggacgatctcgccctcgccgttgcagtcggggcagacggtctggaagcgctggatcatgggacccatctggcgcatcatcgtcttcataccgctaccgttgcagcccgcgcactccttgacagcaccttcctttccgccgcggccatcacagccactgcagatgacggacttctggagcgccaacttggataccttgcccttgtagatgtcctcgaggttcaccttgtgcacgtggtggattgtacgggccttcttagggccttgatcacgcatgccgccgccgaacattccaccgaaggggccgccgccgccgccgccgaagaattgagagaacaaatcctcggcgttcatgccaccgccaccgcctccgtgctccaggccttcctcgccgagctgatcatagatttgacgcttctccgggtcgcaaagagtctcgtaggcgtgcgacagttccttgaacttctctgcggcatcgggattgttggtgttcttgtcttcatgtgacgaaggggtgtcagctgaatgtttcctaaatttgctattggagtctcccgggttgttacataccaggatggtacttgagagcacccttcttataggcagtcttgagctgagcctcagtagcggtgggagcgacctaaatgaaagaaacaccgagtcagatttcaagcacgaatcacaccggtttcgagaaccagccaagtgtagctttgcatgggttaacataccccgagggtgtcgtagaactttgtttccttgaccattgtgaagtatgcgggggatcagaggcgtaagaaagagaatcgatattaggtattcccgttggaatccagaagtgaagcgggagaatagaggggaacaaaggcgaaagtttcagagtgcttttatatgagaaatgccaaacagacaacaattgcggttatttgaagtcctggctggggggagatgaaaaagtggagggaagagaaagggcgagatggtttatctgaacaatagtcgaagccaaaaaaaggctgagtaactttttttacctaggcgtatgagactcgtaagattacccactcaattaccagggcaactaaggattgacggttttccactgcgttttctttgtctcgctttgaggccgattttacagtttttcagtccagaatcgacaatttgctctacaatatgggctattcttcgtctccagctcttctggtggcttctatgtacatcctgaattggcccgagcgctgattctacgggattccgcggtcttcgatggaattcgcaagtcttctccgcgcttccatgttttgttttattacgctgactaacggagtatatttcacgcatcagaggaatgatcgcactccctaccaaatggctgttaaatttggcgatttattggcctcatggcatacacattacatggtttttgcatattgtttcctgcgtgcaatccctgtgtaccagaaactcaacaatgcagaaatctcgaagccctcgccactatcgagctaaaagccacccttcagccacatatatcttatcgataagccaagaggcgagggggaaataaaagctcttcaaggtccactcggttccctcgtcatagaggggttcggaactctccgaccatgccgattatgccttggagtagatttccgtatctcgtagtcttcttatcttgcccctctacttcgtagctcacactcagctcacctactacacactccgaaatggaacaagatcttggattcattgctgccgtcgaagaggcgaagcagggcctctctgagggaggtgtgccaatcggtgctgccctagtctcgaaggatggaaagatcctcggccgtggtcacaatatgcgcgtccaaaagggaagcgctgtcttgcatgtcagtatagcatgatatactgcattgatatcaattgtcgatctatatctatacccaatattacagcgttcatagactaccgctaacacacacaaggccgagatgtctgcccttgaaaactcgggccgtcttcctgcctctgcttacgagggtgctactatgtacaccaccctctcgccctgtgatatgtgtaccggtgcttgtatcctctacaaggtgaagcgcgtcgtcattggtgagaacaagagcttcatgggtggtgaggagcttcttctcaacaagggcaaggaggttgttgtcttggataatgccgagtgcaaggaattgatgaccagcttcatgaaggagaagcctgagctatggtatgttgtgtttggtgctcgatctatcgcaatgcgtaaagcggctgtcggtctgctggcagttgtgtcgaggagtttcggttgtttcatgatcgtcaatactaactgtagtgtctgctatacaggaacgaggatatcgctgtctaatttcataaggcctgcatatatcatagccctaaatacccgagaattgaaattatccacgcccaaaatatgtgtttttagatccaatgtagactttttatctgagtcggggaagaagccgaccgcttttaagattcaagaaaggcacaattatacggtcaaacggtggatttcctcaaagaagaacttgaggttctcggggtcgacgaatggagtgacacctacgttgagagacagttagttagatggcatacagcgccaaatcataaggttcgacttaccgtggcctaagttgcagatccatccctgcttgcccttcttgaaaccctcgaccatgggctcaacagtggcagtaatagcaggaggcccaccgtaaagcatgccaggatccgcattgccttggatagtcacacgaccgttggcaatacgcatggcatcgccggcatcgtgcagccagtccaagccgacaacattatagcccgaatcgcaaaggtcatccagagcgtaccaggcgcccttagcaaaaacggtcataggcacaggctccaagcccatctcctgcagccgcttggggaggttggcggaaatgtggcgcaggtaaggaagcgagaaggacttgaacgagacgggagacagctccccggcccacgagtcaaagacctgcaccagctgcgctccggcagcgacctgaagtgcgagatattccacacatatctcggcaatcttctgcagaagagcctgcgcctcggcagggtacttgtagacccatttcttggactgcacgaagagcttgctgccaccgccttcgaccatgtaacacagcagggtccatggtgcaccacagaagccgatcaggggcacccggcccttcagcttgtgtcgtgtaagggtaattgccttatagacgtagtccagctctgctttaacatccacattcttcgccatcacaatttcgtactgcccgtccgtcggagagtcgagtggcgcggggaaatgaggtcccttcttgtccagcatctccacgaccatgcccatggcctgaggaatgactagaatatcggagaagataattgcggcatcgatgaggccttcataacgctcaacgggctggagggtcaaggttgatgcgatttcgggtgtgcggcagcattcgaagaagtcacggccgcccttggcctcatggtattcggggaggtatcggccagctgttcaatagaaaaagaaatttcaatcaagtgtccttgggaacgtagtgcacgaataagtctaactcaccctgtcgcataacccatatcggaggacgctccaccttctcacctacgatttgtcagctccggccaaaactaagatacagagtaaacataccccgtgcagccctcagcagcaggtcgtttttcaaaggctcaaattgttcctgcattgtgttggtgggatatgcaagtgcgatggaggggggaagtgggattataagaaggttctccgggtaccgcggcccgtgattatcggaaaacatagtgacaacgctttatacccgtagcatcataagttcgttttcttcccgaggtctgtttttgcccaaaaaaaaaaagagagagagaaatgggctatacatgggtattttcatgtttattcgaatataactggaatccgagttatcacatccatgaacatatttgtgtgtttcgccattggtcatcaccggtacaacttgtttcacagaggttgatctatccacccttctatatcaatatatcaattaggacgttaccccaagataccctgttgccggtcactacgatcatagtatgacagtcctatggttactccgtagctcacaggtcaggccactggagctctcgggagcttgaagacgctctagcctgtttctaaccaccataagtattgctgagaaccatgactggagttcgattagacaggaccttttgtgggatatcttcggtagatctaggctattacgataaattattgatgtcgcagccctcgggccatcctctcagggtgcactctgacttactatttaccttgatgtgggaatggtagatataaaagcaatcatatctccccttgctgaccgaatagccttcctaagagaagattagatctctcgcatcttaggacctcttttgaccacacagtcgaggcaccactcattcgtaatggctattctttgttgcataccctaatcaatctaatcaagatataaacccaaagaccagggtcaatctcagcaatatcctatatgacaccctctcatgcggacttgtcaacctatatcttgctaaagacagtcaaaacgaagatggtatgtgtgaaaagatactagaaatatatattttgatctaggtgaagtgaattttgcggccatgcttcccctcccctcctttggacataatggagattgcttgctgcattacatatgtttttagaaatctaactgatcatttgctgtacattcataaaaagcatgctttcattcgtcgtaatcacctctcttccgcaggttgcccaagttgtacattgaatcattgagctctttctgctctttctgctctattatcgtaggcagacttgaggtgccttcggagttgattttgataaccatcgagtcctctacaggaatccactttccagaatcaagccggaatgtttcgagaagaggctgggaagacgacttccaagcacatgtcgaatcggattggcgcaaagtatccacggcaacaataatagagcctcttgaatcaataccgaccagttcaagaacgtttcctgacagctgaagtgtatcttggtgagttatcgtgttgtcactttcgagagtgtagcaaagaagttttgaagacctgctctcgacgttaggacaaatatagatatcatcaatggttgttagaacgtacccatcaagtgcaacaaagatagccttcacagaatcggaattgcctgccgtagacgcaagggaaacatcccaaatgccgcgcaccgtagtctctccctccgacccaggaagctgaattttttgtaaaatctggttttcgagccagtcccacacaagcagatagttgtcgccaccacccgagatgagaactttaggttcgaaggaagggacgcaaagactgctgacaaatgaagtgtggccaaagcagaattgctcaattacatgcgcttggggaacaccacgagagacacggatgtgctcatcgcgatctccagtcaggatgtaactccgcttgccaacggccgagtctgcaggccgggtcacagagattaattccgtcaacaacgaaacgtgaccaatgatgacttgatgctcgaagttcagcacagcccgttctgcttggttggtcttcgacagagcagcctgtcgcatttgttgctccaatgattcaaggttgcgttttgtgtgcaccgtgaggtttgtggcagctggctcatacggcttcgctggagcctggaccttcacgtactctccgctcggaatgagtgggaaagtgtacacatctccgaatttgtcacccgtcaagatgttgttctcatcgggagtcagggtaagtgcagaaagcttcttgggcattgtactatatatgatgagtttggcgaacctgcagatagaaaaacagccactcaccgagcactcaattgttggagtttgccttcgttatccaaactcaggactcggacacatttgtcctcagaggtcatgatcactacatatttgccgtgggcaacagtcaagagaggaatattggtccaggagttggaagcgtccttgtccgaattcttaggatttgactccaatttggcatccttctgttcctcggagggtgaagacagcttccttcgcttttctcggggaccttggctttcagatgcgggagccgcgtcagagcttttatcatccgcattcgcatctacggattgaggccacacatccaggcgctgaccactagatgcatcgtaagagtagagattgcgtccagcggtggcaataagaatatccgattggcctgctgactgcctgttgacatatcgcagacactggaatgggtgttggagaccggccatgatgaagtctttgattcacagagtgaaaatgatcaacgatctcacaaataaaccaattgcgtactactaattgtagtcaagaagacaacaaataacagtaatcgctcccgagattcctctgatcgaattccggccatgtctgtccatcatgggcgggtctactttcggaaccacgtgacccactagcgagcgcaccaccaaaattgattcccccgaaccgcacacctcttctttttttctcttccattaaccaccacaacaatagactttcccttaaacaacctatcttcactgaaatcaagaagaaatggggggcaagtccgcaaccaagtctgcttactttgagaagctgcgtgctctgttagtttctcaatggcgcctagcaattgactccattcaaaaattctaacaatcttctgttatagtctcaatgagtacagcaccatcttcatcgtgggagttgacaatgtcagctctcagcagatgcacgagatccgtatcgctctccgtggagaggccgtcgtcctgatgggtaagaacaccatggttcgtcgtgccctcaagggtttcgtcactgagaaccccgagtgggagcgtctgcttccccacgtccgtggcaacgttggtttcatcttcaccaacggtgacctcaagtctatcaagactaagattcttgccaaccgtgtcgctgctcccgctcgtgctggtgccgtcgcccccgatgatgtgtggatccccgctggtaacactggtatggagcccggtaagaccgccttcttccaggctctcggtgtccccaccaagattgcccgtggtaccattgagattgtttccgacctcaagctcgttgaggctggcaacaaggtcggtgcctccgaggctaccctccttaacctgttgaacatctctccgttcacctacggtatgaccatcgcccaggtctacgagaacggtcagtgcttcggcgctgaggttcttgacatcaccgatgagcagctcttggccgccttctcccaggctatcgctaccatcaccgctgtctccctggctgccaactaccccaccctgccttccgttatccactctctcatcaacggatacaagaaggtcctcgctgtcgccgtcagcaccgactacagctggcccgagattgatgatctcaaggaccgcatcgccaatcccgatgcgtacgcctctgctgcgcctgtcgccgctgccgccgccacctccggcggtgacgcccctgccgccgcagctcctgctgaggatgaagaggagtccgatgaggacatgggcttcggtctcttcgactaagcgccctctcgacgggatgcggatgccatgtattagatttacttgaactggcgcttgaaatagcgaccaggaatgaaaaaaacatgtcttggcaatggatttccctcggaaacctaggactcgtatgatggacgtagctacgcccattgttcgtttccacggaattggtgagttttcaatcccccaccccctttttgctcctaccccttgcacacccaccacctcatatcaccctggcggatgattataaatttttaaccccgagcatttacgcccccctccggggcgctctgaagattaaattaatgcaacaacaacactctaattttttgatgacgccatgcctttaccctcacacatgcttttgacttttaacacatttcactgaatttgcaaacaattgctaactcgtgacaagattacagacgctctccatacgacctgcgatagtagtaccgatatgttgtcgccgtagacaattgtgtagttgggtggctgtcggaaatcctgttcgctatctctatttgtgcagctgccgtaatagatggttgctcaatgaaaaatcgttctctcttcgaacttattgttcctgttcgtaatggtagccaccagcgtgtaactggttaacagtacaacataggattacgcatattttgtctagcaactccatatgaaaggtacataaatccaacgtgcataacgtcgatatttcactctccaactagacactccgtactccgtggtggatgggaaatgtgatcgatccacttgattatgagacactctaatagcccaacttaccctcgatcgatcaaacggcattccgatcgctgctgccccggatcggtcgattcccgcggtggatgcggataatgtattaaaatgaccttgtaggaaagggaaatcccatcacggtctctatttctcagagacgagatccaatgactggaatgagaggtcatggcgaggtctcagtaaggcatacggctcgtaaactacatgcggtctttcgcttgctttgagaactatgccccttcttcctcgccccgctgagtgaagccgtccgctgaaaaacagatcctttcaatgcaagttctagcgtggctgtactagaggacgcctgggacatggcagaaaagtggatagagcgcgggctcgttctcaacggcttgccattgggagttgctgggaattacggtgtaaaggcggccgtttctagcgccagaagctgttcttttcggtgtcattttcgacaggtcttaagttttatattagtgaatttccttttcgcgttagctttgccttttggggcttagcgtcctcgtaacctcccgacctcgggaggtccccgctgatataacccgctctttgttgcccaggtgcctaatatcggctttgttagaatctgcaggaagtgagacaaccttgaacaaagaacaggagccacctcatactgctaactccaagaggaaatgacaggagaagagttcccccaggcaacctgcgacagcctgagcaattacgcgcccaatctgacctagatagcctggagcgaagagctgaagaaagagacgcctgtaatacaagagcacttcaaaatcttttgatattatatggaggcacaagctatttattcgaactctgagcatgtcccaaaataacctcgtgctttgacagacgagatatcttaacagaccaggtagtgtagcaaaaaaaaaaaaaacaattttcgcatccacaagttacgtccgctccatccactgctgcagaacatcagcaacttgcaaactatttttctccatgaacaccaaatgtccatttccatggatgccgatatccgccagctggagatgttgcgccgggacacctgcctgttgcagaaaccggactgtgcaccagtcatacggcgcgtggtaagacgattcggtcgtcaggaccaggacgggcacatgggcaagattgacgagctgtctcggtgcgggggaatcggcctggattacgcagtcggaatacagcgacgagttggaagggataacatgcttcacgaggtcgaccggatcggccacggcgggcgaataggttagggggatgtcagtaagcccgtaggcgcgcgtggaggagttgctgaagattgcgtcctggaacggagggccggtgggttcgatcgagacgatggagtgaacgagatccgggcgcacatccgcaatgagccagggcatacatccgccctgggaatgggagaggaggatgactggggatccgatggtgtcaagcagggcggcgccggcggcctggacggtcgactgctggtaggttgctgaattgaggaattcgactgtcgaggaatagtaagtgtcgaaattccggtcgcccatgacgcccgtcccgttccattgggtgtgcagggacgcttgccgccagaggttgtatagcttcggtgcggtaaagcgctgctgcaacacctcggcactgtaggtgctcagcgttccattgccagggaaccaggcactgcggccgcggaaggtttgatcgatgatatagcatgcatatccctgagagagaaagtaagacgcccagccttcccctccatctggcttgttgagccaattctgccaacatcacggttaacctctaggaagggagagaatggttcaatgatacgtacggtgcctgtttgagcttgtccatggatgaagacaattggatacggcttggtaacacccgcggccggtgtcagtttttccacgtacatctgatccgcaaagatatgttggccagcatcattcagaatatattgtcctccaacatacatgtacgatcgctgggctggcacctcaccgcaccagcctgaagccgcgacaattgcccagatcaataataatcctgtcttgatatgcattttaaggggatggccaggggtcaacgaaacgacaaggatcatcagtcaatttatttaccggatttcctccgcggtcggccttcttgttggcccccacacgggaactacatactaacggagagatggggagttcactagttagaagctaggaaatatctccgtaaatggatcctgaatccttcgatcttggaatttcttttatgagtaatgcttggaaaatggttgggaagtgctcccttatgaggaagtttctgtctcttctttccctcttgcttacttcggacttccagaggcttcaaaggccatggattctaccctcatcattctttgggtatttacctgggtggcaattggcttaattgtccttcggctgttagcgcggaagttgagaggataccagttcgtcctaggcgattatttcgcaatgggagcgattctctgtgctgtcatacgcctcgccttggttcatgttattctcatctggggaaccaacaatatgtctggcacattcagacgcacgcacgtttttacccccgaggacattcgtcgtagagagatcgcgagcaaattcgtgctcaccaatcgagtgttctataattcatagtacgtgcgttaaacggaatccaaggtcggctatttctctttctcatatttcttttagtctctggttgcaaaagttggttctgcttgatacctatcgcagactgctcaggcaacttcgctgggagaaggtcacgatgatctcctatattggtatattcgcagcgacgtatgtaaccgtacagactgtgactttcacggagtgtgatccattcagtcattactggatcgtattaccggatcctggtatttctttccctcttctaatttctctcttattttcgtgtttcgttgaaccttctaaccaatacaggcaaatgctgccaggcacagctccaattgatcgtcctcggtatgcttccagtcggaaagatcggttcaatgtaatacctctaacattctagtttcctcaggtgtattgaatgtcatcaccgatattatgcttatcgccttgccgattccaatcctggttctggttaaacgatccgctgttgagtaagtctacccatatcaccatatgaatttcgttgacgagctctctccgctagaaaaatccagctagcggtcctcttcgccgtcggtctcttcatcgtcgcaatcaccatcgttagactacctcaaaacgtcaaaaatcccactgtacaagtgaacagaacgacttgggcatccgtcgagttgctcgctgccgctatcgtagccaacgctccggttctgtacggacttctgaagggacggagccaaaggtccaagtacgccgcatcaggagccggatcaactgggccgtcgtggcagggacttcaaaagaggtcggcaaacgagctcgaattagaactgcaacggatcagtcacagtgtgggagggcctgttctcggttcaaagatatcatccagccattatttggagatcgatggcgggagtagtcagtcgttgactcgaagcctagataagtagggaaaaactcgtacggagtataacagaaagggcttcaagccgagctaaacgtgggctttatagtcattcggtttattcggaattgtccagtgtagcactagatgcccaatattattgctgatccccttttggccctgtcccaaaggtaagattcggtggtctcctaggtacggagtgcgctatgtcagcgactttcaatataagcatgtagacatgttgcgtatcgaattatctgtcaatcccccctattaggaaatgacaaaagcgtaaattttacttctagacaatttgccatttgcaacatccttttaacgtgtggtcacctgtatcaatcatgctaagacccgctaagctaggaaaactttcccctctgctctctgcgttcccttctctctaagcctcgcaccgtaggtccatatgagaaaaggcgctagcaaaccgaagccaatcatgatgaacgccaatgtgctatttccccatccgtattcaagacgatcatatagagccggcgcgaatatagggaagcaaaaacccaagatacttcgcaagaattgactagaggcattcgctgacgccacgtattccctgtaggactctataacatactgctgtatggcttgattactgagaatcactccacagccaaacaccgatgctccaatgccgacgacgattcacggagccattgcttccgctgtccagccataccatgatagaccagctattaggaaaacaatccctgggaaaatcaagggagttcgatattcaggtgccgtctgtcctcgcttgtgtgtcagatacttccagagccagtcggtgactcgagcgccaccaggagagccgacagtatagccgagaacaatagcgacataatgaacgccactgatcaacaccgattgatgatatctctttgtccagagggaggcaaagctggtgaggacaaagaagagaacgccataattgtaggcgaggaagatagccatgatttgaatagttgactgagtcgccatcatccaacacgggcgcgcgagactatagcagagcttccttgccagtggttgattgtgaacatcggtcttgatatgaaaaaggcctgcttgtctccttttgtaatttgatggcctttcgatgaagcaacaaacgatgataagtttccggaaagaaaaaaatcgcatagataaccaaagcagcatcgaagatggaaacaacccagaaaagccacctccatccgatttttgtcgtgatgataccgccgaggatagggccaatagccggacccaacaaggcacgaaagttgcgatcgcataagaatgaccgcgctgctccggacgccaacagtctgccagcaccagcgctgtggttgcaaactctgtaccgttttccaggccactcagaatccgcccagccagtaaaaggcccctggtgtgagcaaaggcgcaaatatgttccacagtatataccaggtcgaagacaagatccatacccatcgatgaccgaacacttcggccaagagagcgagaaccatcggtccaaaggcaaaagcaagcacgaaaatcgagaccaccatgttggcttcgctctcactgatgccgaggccgtcaccaatattgttcaaggcgggtgccagcatggatgcactgataagggtcaccatgccccccatggagcacagcaaagtgatggcccatcgcttggacagggaccaattgaattgacatgcaggatcgcctggacccttccattctaccagtaattcgtcgcttgcaggatcgggatcgatatgtatccgaacttcgctcagctcggatgtacatggtttttccatttcatttatatgatcaatatgataatagatgcaatgaaaagcaaatcgttactatctacgaaaatacagaagacggggaaagcaacagttgatactgatttacactacggagtacctggccaggcttggttacaacgaacaaagaatagtcttccaaaagtgcaggggttagcagtcattcacgttgcttccggatcatctattgtccaaatgaaagagacacctgatctaacttatctaatctgatctagaaattgggcctcgaaactaactgttgaggtgcaatagctgcctgatgcatccctgctaggtccctgtcgtcaatcgaatatgattcgcccaagtatctttgccattactagcaaaacatcgaagcttactgaacacaccgtaaaagattcttattttgattgtttccttacagttggatgtgtgagtaaagacccgcgaagagatactattgttgctacttttcgaaggacggttcaggaggtttaagatacggccggaatcatgtcggccctcctctcgaacatgatggtttgctgggccttcgggatttcaaatactggatttagacatgattctgaacaaacatttggacggatattgtgttggaagagagctaggccgaatgccttaatattttggcgctagagctctggcgaaaggaatcgactatagccttcttactgattgttctctgggatttcaatcaatttgaaacggttaagccaacccaatgatcactatttcctctaaatcagtatctaccgtttaactgttccatttggagctctgactagccatcgaaattaatttcgctctgtaacataaatgcagataaagattctataccatgtgcttttgctagatgagaaaccttgctgccattgcacactccctcgctacggtgacggtatgtatgtccatggggcatccagttgatcttcgatgtcttcaatgcgcagttatttgggccaaatgagaatctcacgtaagtcttcattgcatcacgtgccttctgtgtacccattaaaagatctatcgttccctctacgctttccgagtgttttcgatagcctcttcagttcataattatttaactaggcaataagtcctcagttatcaagtcttcaaaatggcccaaaatgaggatatcaacccacgcccattcaacccccgcccattctgtcccgatcccctagtcatcgagcctcagcaacgtattaagcagcttagagaatacctggaagatccggctcccaaaatgcaacgccacagaactaacattcaaggactcatccgaatgtatgagactggggaactcgggccccttgtctttcctggtcaggagacgatctggatctgtgaggggaagatcatggatccgccgcctcgccttgatgaccttgcgcacattattccacattatgccgtatgggccgaggacagtctctaccttctacctttgctacattttaataattcctaaccattcatctagggattatatcaacagttgatgcagcagattcctccccagataactaccttgaaatagtgatcgaaatagtgatgtggtatagtggcctaggattgatctgaaccagagggatgagtctccgtggcgcactggaactactatatctcgttgattatcgttgtcagtgcagtcctacataattagtcaaagtttacgatggttgccttcgaagagaacctcgcagtaggaagtaactcatgtaagactatcagggtgaatatataatctggaagcaatcctaacaaacatcgcttggccacatggaattaattgattaatcacaacggtgctattaggttactaagataccatattggaagcattcagttcgcctttaccaacttgataataaaagagccctacacaaggtggagtcacagtgcagacctactggctgaattccattttaccagaaacagctccagtgcactgaacatttccattgtaatacagcaaaggaaccttcgaagttcaagttcctctcagagcatcgccactgtaacagagtctaggaacaagaaggctctctcatgatatgcctgagatagcgtccgattgtaccttcttgtctcttttcggcacattttcatgtatacctgtgtaggtgcaaaaccaacgtctagggcaacgtataccttctgacctgatagaagaagtgaccggaaaactggagttgcaacgtagcccacgcgtggtatgaaggtgaccgccgtactcgtacttatgtgttggttccgtcacaacttccgtggatgtatagagaactcgattgtcgtgttcgaacgataatttgagcatctccctggatctagaacgggatgactaacctcaatcctaattcgtgtgttaggggtaggggaagcgttaataacagcgagcttcgcggatgcttgcgcggatgcgtaaaaccggggctccgagcccgtccgtgatcgttctcgggagcttctaatattttcaatcttgtcataactccgttccctctttgtcttgcggaaagtagagctcgacacgtccaggaggaagggccctagctcacgtttgggcgctaagcgtaacggaactgaaattgttaggttcatgttcggtatgatgagggtaggaaacaaaaggataatggagggcagagcacgggatctgaggatgagtgacaagatattacttactcgaccatatgctgtagatattcaagctaggacaaataagtgcatgcctttgttgcttatacttgggtactcaggcgtatgaatcaacttcttccacttgtaagtataactcagaaccgcgttgccttcccggaacatagacctataatctctctaactgtacaggggttgagaaaaatacgacacagtcacacagacaaaagggagatgagaaaagacccttactatggcgtgctcggaataaatctccaaaaaaaaggggactcggggaccaggaatacggaatcccgagcgagaataaacgaggctatgttggcaagggcgagaaataaacgcaacaggaaatttgaagtcccacaatttaaccaaccgaatcactagtcaatataggtatatgacaaagttctcgtataaaacaagccaaacgcctcccgtctaggcaagacgaggctgaaatcgaagggcatctccgaggagaaggacaagaataatgtacgatgtacttcgtgtcgcggagacccttattcccatgaggacggttatgccaccataaccatgtcttagagtcagctggctcagatgaacggcacaacgccacattatttcctttttgcctcttcctctcggctgtttcttctcttgtaagcctctattatatccacaagtcttggatatgcgcctatgtaacccgtagcggcaggaatgtcttgcgtgatatggtcgaaagtgccaagggacgcactaggaagacttagcaagcaaccaaggtggaaaaggtaaacagaaatagttgatacgtctgctagtcttgtggcaccatgttttaagttaagggcgcatctctaagaggtattactccgtacggagcactgctttagtactttattatttacaatatcccgctagatgcgggccgacgagaaagctcgatgacgtgatttagatcttgattgcgcctttacaaagtggatgaaaagtctgcaggtgacagggggaaaagacctgcatattctaggtaagcattgagctatgccctcaaatcttggccgttggagagtcgtagctatgttgtatggcttcgtgtcgagggtttctctactgggctgacaaggttctgggaaagctggtcgcttacggagtagaaattgcgtgactacctccgtatgcaaagaggcaatggcctacggagtactccgtaaattttgtgtgcatgctcccctacatccggagtatgcacctaacagatagagtagcgccgagcccaaacgggaccccacgcgacacctttgactcaaatggattaaagatgaatggactactccgtaacgggtggaagggacgcggcagatgagcaatataaattagatcccgaggtccgtgtggagctgtaggcatattgctcccgaggtcttgccattagaaaaccaccgttgaagctatacacttatgtaaacatgatattcaaggcggtggccccgggctggaataaagttaatcagctaagaagattcttgaaacaccagaaaacccgccggagaacgtaccaccaaagcgtggaacctcctttgtgcctttcaccatctcttctccagattgcgtgttctaaacggtgtgtgattggtctttgggtcccactcgttgatcttcttggcgcaaacctcatcaggacgcgttgccattcgtcacccagaaccccttggcactaccgacagcttgtccggtttagtcctcggacgtttatattcgtcaaggttatgatgacatggactcccaggcgaggcgaatatcatgagaacaatgaatattccaagggcgatgcgtgatagtgcttaaaacaaccagcacataaaattcaagtatcccgcctcatctcgaccacggactgcatgcaaaaaaaacggatatactccacgacccgtcgtcatttctaccagaccgagtgggacctgcggatgtgcgagatcgtcggtggacccggctgccgcgtgaaattcgtggtttttaacaacgtgggctcgctttcagccaggttttgctttttcttgtgaattttctacctcaaacttgcacttgatacaagtctagccctcgtctaatccttgcatcccttgccggaagtccaacccaagcgagccaagcggaaaatttcaaatcttaatttgaatctggggagctcagatattgcgccatttgggatcgaatcacgcatccaaccttgtttttattttctttattctttattctctattccttattgtcgtgccatggaaagtgcatgatcgtctgatttgacattttctttttatactcttgatcgtcaccacatctctagggtttccatcttttcaagtcaccgctgccaacacacatagcggtcctggaagcgtcgtcaaatcccggcatttgatattgtcaactccggtctgtacaagcgtgaccatgtttgaaaaatggagcgaggccaataccaatattggccattccctggccaaggtcctcggtatcaagctcgcatatagagaccccctgggtgctaccggtgccggtgagaccgtcacaagaggagaatcggcattttctatgggcaccgtcgacacatactcatacaacgagcccgagccgacaagcatcgactgggttcgcgaggtcaccccgtccggagcccagatagccagatatttcctccatctgttccctttcctcacatggattaccaactacaacctacaatggctgttcggtgatctggttgccggtatcaccgttggagcggtcgtggtgccacaaggtatggcctatgctgaactggctggactgccggtacaattcggtctctactcctcgttcatgggagttctgatctattggttctttgctacgtcaaaggatattactattggggtgggtgatactgcgcccggtcgaaaccaaaataaaacattgctaacctcatctcatagcccgtggccgtcatgtcaactcttaccggaacgatcgtggccaaggtccaggtagaatacccagattacccggcccatttgattgcatcggcccttgctgtcatttgcggtggtattgttctagctttgggtctcctgcgcatcggattcattgttgatttcattcctctccccgctatttcggccttcatgaccggctcggctctgaacatttgctccggacaggttccgaccatgttgggcgagacggccaaatttagtacgcgcggtgccacctacatgatcattatcaacaccctcaaatacctccccacttcgacattggatgctgctatgggtgtcactgcctgtgcaatgctgtacatcatccgttcaggatgcacttacgccgcgaaaaagcagcctgctaaggccaagatgtggttctttatctcgactcttcggaccgtgtttgtgatcttgttctacactatgattagtgccgccacgaacctgcaccggagggataaaccagcgttcaagatccttgggacagtccctcgaggattccaacaggccgccgtgcccactatggatcgtaagatcatttcagccttcgctggcgaacttccagctgcggtcatcgttcttctgattgagcacattgccatttccaagtccttcggccgagttaacaactacactatcgatccttctcaagagtttgtggccattggtgtgagtaaccttctcggacctttcctcggcggttaccccgccactgggtctttctcccgaacagctatcaagtctaaagctggagtgcggacaccccttgctggtgtcattaccgcgatcgtggtgctcttggctatctatgccctgcccgctgtcttcttctacatccctaaggcttctctggctggtgtcattatccacgctgtcggcgatctgatcactcccccgaacaccgtttaccagttctggcgcgtgtctccgcttgatgcgcttattttcttcattggtgtctttgtcactgtgttcacttccattgaaaatggcatctactgcacagtctgtgtgtcggttgcagtcctgcttttccgtgtggccaaggcccgcggtcagttcctaggccgcgtcactatccactccgttgtcggagatcacctgttggatggcgatggaaagtacggatcattcggaactaacaagactccctccgacgatgaagaccgccaccgccgaactatcttccttcccatcaaccacaccgatggctccaacccggatatcgaagtggagcagccccttccgggtatcttcatctaccgctttgccgaaggcttcaactatcctaacgccaaccactacaccgattccctggtttcaaccatcttcaagaacacccgccgaacgaacccgcacgcctatcggactcgcggtgagcgcccctggaatgacgctggtccccgccgcggcaaggaaggcagcgacgacgactcacacttgccccttctccaagccgtcattctggatttctcatctgtgaacaatgtcgacgtaacctcaatccagaacctgatcgacgtacgcaatcagctagatatgtacgcctccccccgcaccgtgcaatggcatttcgcacacatcaacaaccgctggacaaagcgcggcctggctgccgcaggcttcggttacccgacacccgtcgctagtgacggcggcttccaccggtggaaacccattttcagtgtggccgagatcgaaggcagcgcctctgccgctgcctgcgccgaaatgattgccaaccagtcccacaacaaggctacagatatcgaatccggcctcaagtccgataccaacacaactgcacgtgagactgacggcatcgagaccgcatccgagagctccgaggtcatccgcgaggacaagttccatcgtgatatcacagacagcaaggcgtaccagcgtcgtcctaaggttgcgctcgtgcagggcatgaaccggcctttcttccatatagacttgaccagcgctcttcaaagcgctgttgctaattcttcggacgtgattccacacattgagtgattttttctttctacgtttcatttgctcttcgatttgcacggcatctcttttgctacccttttgcatcgattcaattgttcctctctggcttggagtccgatctgatataccccgatttgacctgttaatatgatgttgatgtttttattttcccattttcccctctgtactttttgtcacttagcactggctatattggatgtatttcatggcgttgaccgtgaacaacctgttgttgtggtatattctttcagcactattcccttgattcgtgtgggttgatttgattgatatgggtcttgtttattggcccttttgcatctgggaagaaacggatttttttgcgatggacatggttcctacttgatttcttcttaaggagatacataccctttctgatacctatatctgatagacctgcttggtgaatacatgtatattccacctcatcgcttgaacatagcctgtgtagtctcttgcctcacacccccaccctccgcgtaaccaaccatcaacaaatcagccttctgatctgtccgaatgccagagatctgattcataactcttccaagtctagccgcgcaatcctaattgacctgatcacatatggctccccattgctggatttatcctcgatgctgctggtggggagaataagaggattacaggctactgtccggctattgtccatgctggtgcaatggcttctgttgcttctatcattcggctgaagactgataagcaacttcttacgaagctttaggccaggtgggtaggagttatgggttggagaaatccaatattgtaggataccgccctgtaaaataatattgctcaaatagagaaatatatagagaaaagacgagttcacaacaagcgaggcatatacatagatggccgaggttcaactgggccccatagttcaagtactgcgaagtacgccgcatccaccagaacgtcaacctcaagtctttttcttctattcggatctcatttcccttctccagagatctgttcgaagtccttcaattcaaaatgactctgaaaccggtcaactgcctgagacgcccagcactacactgcagaaacctagccgttcctctacgccaatcaccaattaaaacatgcgcgcaatatagctctcactcaccaatgggctcaacaaccaccagcacacgcaaaaaagtaacaatacaaaccatccaaaacctctacaaaaagaacgaacccatcacagtccttacagcatccgacttccccagtggccatgtcgcggacacagccggaatggagatcgtgctcgtaggcgacagcctcgcaatggtcgcaatgggcatggaagacacaaacgaagtaacaatggacgagatgctcctccactgccgcagcgtaaaccgtgctgtcaagagcgccttcacagtaagtatatccatgcatacatatacaatgcctacgcccggccaagttaccacatctcacaactcgctatagatcgcagacctaccaatgggctcatacgaaaccaccccagaaaaggcacttacatccgcaatccggatggtgaaagaaggcgggatgaagggcgtgaaactcgaaggcggggcggagatggcgtctacgatccgcaagatctcacaagcggggatccccgtcatggcgcacatcgggctaacgccgcagcggcagcactcgctgggcgggttccgagtccaaggcaagtcagccgcgggcgctgtgaaactgctgcgggatgcattgactgtgcagaaagccggtgcttgtatggttcttattgaggctgtgccgcctgagattgcgggtattattacgcggcgactgagcgtgccgactattgggattgggtctgggaatgggtgttctggacaggtgcttgtgcaggttgatatgttagggaatttcccggaggggaggttcttgccgaagtttgttaagacgtatgcggatgtttggggggaggcgaggagggggattgaggcttatagggaggaggttaagagtagggcttttccttcggtagagtatacctatggtgtttctaaggaggtgttagaggagtttgagaaggttgttgatgaggttgcggagaatgaggagtaataaaccagcactcggtgtatttttgggtcttcagctgcttttcaaaacaatctgtacatgtgctgaagactttggactatagtcttggccttcaatatctgcccatcagaggtgatggcaatgtattgtttcaagtcggttttccgcatgctttaggaggcaaaagcaatggaagacaaaagtctccaagtatgaattaaaagcatagaacaattcaattcgtacagagcatatacagcccccataaacatcacccaatcaaatccacccgcagctttatccaagatcctagaagctgatactcttttcacctcaaaacacccccaacaccagcccacccaagaacaaacccgctaagcgcctcactcataacaccgccaccaaaccaaacatcccgccaagcgcccttgcggataatcttcctcggaccagccttgccagcaagctgcatgtgcacagccttgctcttctcattcatttcaataacaccctcgatctccccaggggtactaccggggaagaacgagccggcacctgcaccaccggagcggtgaatcagaaccgcatggaagagccctgataccaggatcgtgccgaggaagtagaaggcgaatccgtagcctgattggagggctagaatcccggcggacaggccgaggaggaaggaggttaggctgtggagggaggagaggacctatttcccgggttgttagttgggtgtaacatctaaaatggaggatacagatgcggtctgatattggtgtaggggatatgatatgcatgtggtgcgggataggggcggttgggtgggatgtgggatagtcatacgcggttgttgtgctggacagcctcaggtacaagaggggtgattagcagggagagttcctgctttgtgggtgccattttggctggtttggtgtctttttattcgccgatttgttgtagttgatgtctggattgagaggttgagctatggctctcggtgttcgttgcgggtagtgatcacgtcttgagcgaaagtttgctgagcttgactaagatcacaggccttctgctctccaatagtgatgaaattgttgcaccgggaaatagacttgtgaaggggtggtcacagcagctctcggcttgaactgatggaggtcggaagtggcagtgagtttctagaagtgcacggaccacatggtctttttattcagatgcttcagacgagtacggagtacggagtatgtactaactacactacattcaacagcataactaattaagaaagtatttaacgtaaatcaaatcactcatgttcatatctactattaaccacccaatccaatgttcaataatgccgagcctttctcatgaatccgttcacatcacagcgtttgatacattccgaatccccatgtccttgattatgctgcaaacatagcagaaagaaaatgccagttccatgatgtcgctgacttaaattcaaatatcacattaaaccagattttcgaatttgccatcgacacgggcctccttgacctgctcaaagacctgatggaaaaacgttagtggctgatcagaatcaaataacaagcaacgcttacctttagcattttgttacgtgcacccaaagcattgacaccgcgatcttccagggccttatcatccaggtcgaccagttccgtccattgcaggtccttcaggttgtcggtatacttatgcagcctgagggaccgcagccagctggggatatccttcagaagagccgggtctgtggggtcctcgggcggctttgagctgcctcggcgaccccgcggagagcggcctcgtgtaacctccgagtggtctgacaggtagccttcactaccgagaccaaactgcccaatgttcaaagagcccaagccattacccataagagggttgttgggatcataagcggccaaaaatccattgttctgcggtgacgtgaagcccatcggggtcaagccaccaccgtgcatggcaatgccgggcgatgttgggcgagaccgtctaccggccatggccgcctgctgttgggcctgcagggctgccagctgctgattgttgagaagctgaccggccatcaagtgctgtccacccaggcctgggctagccaagccctgggagagaatcgggtttccatgcgagttcttaccctggccatcattggagcgagcacggcggtacttgcgcgcgtcatccagagcgatgcggttgtttaccgtcgacaaagctgccagcttcattgccgtggcattagccaccatatctgcgtgggtgttggagttctggtgcgattgttgaccgaaagtcgcagtcatcggagtgttggtcattgacgcccagctgtggttgcccacattgtatggcgaaagcaaagggggctctatgtcgggggcgggaatatttgcagtctgaggcagaggggagcgcatgcccgagggctggctgaactggcccataggctggtgtccagaggatgacttgggccgagcgatcggaggctgcgtgtctgaaacaccacgctgagcccacggagagccgggttgttgaccaaggccgtcggaattgttgtcaggcgccgatatggtgggggccacgaaagaggcacgatcgaagactgcgctattgcggttcgatggaggtgcattgccggtttgctgggtgaactcggccttcttcttcgcaatggctgcagcagcatccgggaacatcgcattgatggtagaagggtcgaggacagagttgcgcttcgcgccaggggatggcgggggtcgtccgagggagttccgagaggtgtccatattaagcttcgacatagcgtcgctcagacggctagacatggcatctacacgacgaaaagtaggttagttacatctcaaaaggtagtgtgggcaatttgtcatacccttttcgccaaaattggcaggggagagcaggcccgacatcgggtgaccctgagacatttgctgcaggacctgaatgaaaaaccggatctgcacctgagtggtctgctgcagcaaggcatatagggccgcagttctctcggcttcactcagaacacggaaccattgctcgatggcactgagttcatccttaaagtcctgatcaagcgtggcagctgccatttcttccaatgtagtttcgtactgatcaatgtccgcaagccattgttgagcggcacggtccaaagcatcttctgtcgcattctgaccttgggtttgttggttgaaaaagacctccgatgatggacggatgcttcgggcggacagcggcgaaggaaacccggacatgtctgccgacgcccgcagctggtgcgatccgaggtttcgcgacgaggatggaggacggagagttgaattcgatgcttcaggagtgctgttgcgattgccaatgatatgactggccatggtttagggcgacgtgttgagaggatgactagtaaatacagtgggggaaatgattactgcaaaacacctgcaggacctgctgagtttgcgtaacaaataaaatcaaaaaataaccttcaactaggatccaggctaagatcctaaggtatcagacgacgctgaaaagatctagatctctcgttaaagatgatggcacagaccagtccagtgggctgcacctcggaaattcgagatagaaaaaattaaggcctggaacgaaaggaaattgagacttgaagcaatagtgtgtcaaacacagtcaagccagtcccaaagaaagatgaaaaggaaagaaaaagggggaagagaagaggttaggtggagagagaggagaggagaggaagatgaggaaagttggggatgaagaagtttggtgaagaggcttttctgtttcaggccgcgaaatcacgggttcgccgaggagaacctcagggacaacattctttcttgacttctccatatctcatgattctgaatcttgagggacctctattttctactctttcctgggaattctgctcctcgtggtcaaatccgaatattttcttcagcctagtggagacgttactatgaatatctgccgagcccagacctgagattcagcgcgcaccaactatactgataatgagcttccttggtggtccacgtttctagtaattgtctcaaactatagccttatcggcagtggaaaacacttcctattgaactttcaatcgtcactggctatgagttcccagcattacccggacgggattcctctggatgaggagatgcacgaggggcagtcggagtatccagatatcgatgaaactgttcgctatccctggcaaaatgatcaatcttttaatgttggcgacatgcttgcctcggtgattgatcctcgtttgtttggggaccaaaatccacaaatccaacggcaaagcatcaatcaatatcctcaagatctcaatgaagaccaaggcgaagtcgaagaagagcaggaggttgatggactctacccggatgaatatgacagccaggggtatcccccagtatcatatcctcccgtgcctggcgagcaagccgtgtcggacgaggactttaccttatctggagacgaaagcgagaggtacgtaagttaagacaccatatctccggttttagttaacatgatactagtgattctgatgaagatgaaccagcagaggatgatgacgatgatcattcagccgccagcaggcgccgccgtcgtggcggggggcgcttttccgcgagatggggggcccgnnnnnnnnnnnnnnnnnnnnnnnnnnnnnnnnnnnnnnnnnnnnnnnnnnnnnnnnnnnnnnnnnnnnnnnnnnnnnnnnnnnnnnnnnnnnnnncccccgccagcgggcgccgccgtcgtggcggtggtcgcttttccggaagatggggcgctcgcggtggaaagggcatcaaaagaggaccacgcaaaccattggagcccagtccggaattcaagcatcttcattcgggggctacctctgccttcatcgatggagactacgaacgggccattgatctggtgatgcaagcaattcagattaatcctgaaatgtttgctgcccattctttgctctcggaaatcttcctcgcacaaggagagaatgataaagccctagcagctctattcaacggagctcatacgaggccgaaagatcccggtgtctgggtcaaagttgctcgactcatcttagatcgcgccggagagaatcggcagtccgcattgcatgatgtagcttattgctacagccgtatcctcgaagtcagcccctccaacaccaatattcggttccagagagcagcaatctatcgtgagctgggtcacaatggccgagccgcagcggagtatgagagattactcaaggactgcccacacagtgccagagcactgcgccatcttgcagagacgtacattgatctcaatgacgtacaaaaggcagtagattattatgcggacagcattgatcactacctatccatcgaccccgaagcctctgatttcacctggtcggatctcaatatctatgttgaactttttggctatctcaatcaacccgaagaaggactcaactctttgagaatacttgcacgttggcttctaagtcgcggagaagattcagtatgggacggccacgaggatgacgacagagaatgggacgctgatgattcgccacgacggatcaaaaccgatggttttctgcccgatcagtggcctcgagagtcatatgggcttggtcttccgctggagcttcggataaaaatgggtgtttttcgcctgaaattgggcgacaagtatcacaacgaggcattggtgagtttgatcccggatcacggtaatgactgaataaactaatacaatcagcatcactttgaatggcttaacccagaagacgactccgaaggtgcccgaattttcgactatggtgatcttttcagggaagtggcagatgctctaaagcaagccggtctcttcgaagaagccctccggtactatacgcccatccagcagaccgccgaacatgccgacattagcttctttatggccatggctgactgctgcatgcagttaggcaagatggaagatgctgaaagctgttatctactcgtcgctgaacacgatgccggtcatatggagtcgcgagtactactagcgaagctatatgagagcctcgggatgagcgaacaagctatgaaatatgttggcgaggcagtcttgatcggccggcaggaaaatcgtagccgcggaagaagaaaggacaccagacttgaacagcttgccatagaattcaagatggctgaatcagaacccctccggtcaattgcacccaaaccgacaaatacagcaccacttatgaatgcagctccttcggctcctggcaaaggacgggcgcaagctggcgaaggtactcggagtgatgatattcaattcttgtacgcgaagttgttagagttgaatccccaagtcaaagacggtgtccctctggccattgaagattggctggacattgctgatgctctattgcgagatttccggaacaatcgggcattctatccaatggatcgaagtattgctttcaggggatattcgactggtgtcaaatccaagaaccagaccaaaaatggcacaatgatggatgaaatgcagcaaatggcgggccgtcttcaagaaaccatgggtatgtcacccgggtccatcctccatccacaccatgctaatgttatatcaaggagatttctcggaggagcccttgcagggcgccattcccaccgactaccatggaataccatttgatgagtggcttgacatattcctgcagtacgctttactcgtagtagaacaaggcgaaccagaggaggcctatgagacccttgattctgcggcgattgcaagcatctggttgcactctaagccaaaatcccgattgatacatgtttgttggttcagtgagttcattcaattcactactgagtggttatccactaacacttttacagcatgcgctctccgcgcacgagatgaagagacactggctaatgaagcccgttggtttatcaaagaataccagtttgtcaccgatacttatcgactcttctctatgctgggccacctatgtggcgaccctcaccgatcccttttccattcctccggaaacatgaaatttatgcttcgtcaaatcaaggcaatagactttacgatgccacaagatacgcctcgacccattcggcattctgtctggaaagagcgcgccactctatccacacgggatgaagccggtgagcctatcgctgcgaaagagttagatattgctcttctggtactttatggccacatgctgtactctggaaacagtttctatcccgccctgaactattttttccgagcatatgccatagatgaccaaaacccggccgtcctcctctccatcgcactctcattcatccatcactctctcaaacgacagtccgagaatcgtcactaccttatcatgcaaggactgtcattcatgcatgaataccggctagttcggcagaagccgggaactcttctagctgaaaaacaagaaatggaattcaacttcgctcgtgtttggcactcgcttggtctggcccaccttgctgtcgaagggtacgaccgggtgttaaagctcggcgagcagattcagaaacaggctaagcaagagtctcttcaagaagtgacacctgcaatggatggtggtgatgtggtgatgggtgatgatggccaacaccaaaagacttcatcgcctactggtcagcctttcgttgaggatttctcccgcgaggccgcttatgcgctgcagtgtattcatgttctcagcggcaatgcacagacggcaaaggccgttacagaaaaatggcttgtcatttgatataagttcgtgtctgctttccagactgtctattacttgtaatgtatttatatgagttaaagcctcaaaatcaacactactgagttaattcataagccattatattcaaccagccttcacatgaatgtgatatcaagataggggatataaacccaggacctgtgaatgtcgttttaatatacggagttactgcatgtacttctgtagatagaaattttgacgttgggttgtatcacacccaagatgggagtatttctttctcttgatgtcattacttcaagaccttgaccaacatatcctaaagagaatgagctcactgctgcatacctctcctttattacataacgggatttcgctgcagagattatggggttgcatttgcctccttatctttcaacccccaaggttatattacatattgttctcgcttggctgggcgaaagggaggggactctggttttgagaggagtcagttcggcatcatttcagtcagtggaaacattgaacggggggaacaaagaagttgagcggctgtgaactaaccctagttgacaagaatgtggggagtgcggaaatgcaagcggaaatgcaattgcaattaaaatgcttgctaatcaacatctcatatacgccttaccattgtggcttattactagctcacaaatgactttgcaggccgaagtcataattctttcgagtcggttcggccctacctcgcataaattcaccttaaacctaatgctcgtgtctttcggcctcgttgatgtcatcgagtcattgatatagagaagataatacggccacataagattctaaaccctagagaatgactgcggatagcacccaaagggtcggaaaccattccagctctcaaattgaaggttctgcagaactattgccgatcacattggcgcaatccaattctcccgcagcccaggggtttgatgaagacgaaaaagaccatgatgtcaatgtccaaagcacggcagaagagtcaatagggaagcgcaagtattggagacgttttattgatgctgtttcatggacaccgccgcgatgtcgatggaatacagagaatccgatcaaattcggcttgcctttgaatatcctgttcgcattctcggcaactttcacggtatagcactgagagattgcaatatatggcatagcaattgctaatatggccatgcaggtcgccaatctatactattcacatcccattctggatattcttgctcaattcttcgatgtctcgcatgagcgagcctcgctgatcccgacctgcagccaagctggatatgcgacaggattaattcttctttgtcctcttggtgacttagttcggaggaggcacttcgtattgctcctgacgcttgttactgcggcattgtgggttggtgtctgtatcaccaagtcattcgaggtattccttgtgctgagttatctatcttcggtcacaactgttactccagtaagtggttacaagcaagcatatccgaggctctggcctaaacaaaaaaattaatcatcaatgcagcaagtcatgctccctctcgtcggagatctggtccccccagctcgtcgcgcaacagccctatcaatcgtgtcttcgggactcgtcctgggccttctctttgcccgcctgctctccggtatagtcgcagaatactcgtactggcgaaatatctattggctatcactaggcctccaattcctcattttcgcccttctgtggctgttcatgccggactatccgtcaacaaacaccaatatttcctacttcaagatcctatattccatcatcggatactactggaaatccccagtgcttgttcaggcaactctcatgggatttttcctctcggccacattcaccagtttctggacaacactcaccttcctcctatccggcgatccctacaactacccaaccctgacaatcggactattctctctagcaggtcttacacctatgttcctaggcccactcttctcacgctacatgatcgacaaattcgtgccgcagttctccatcctcgtcagtttcagcatcctgatcaccggcgtcagcgtcgggacctatacaggcacatatactgtcgcgggcccaatcatccaggctgcgctgcaggatttcggtctacagatgacgcaagttgccaaccgtgttgcgatctacagtgttgcgcccaaggcgcggaatcggatcaatacgggatacatgattggcgtgttctgtggtcagctcatgggtacctctgttgggaatcgtctctacagtcaaggggggtggattctgtcgggaagtgtcaatatggcatttattggggtggcgctgactatttgtcttcttcgtggtccggctgagaagggatgggttgggtggcatggtggcattcgcatccgaagaatagagtgaatcagagtgatgttctgccgtgcttgggcttttgtgttcttctacagaaatatagttcctgctaatatgctttacgctagactacatgtgcgtagaaccttcaaaagtatcagacctcttctatttatttgagatttaatgatcaccagtgcatttaacagcaagcttataaagaaaacccacggtagacatatagtatacgccaaactgctgccagcctgctgccagcctgctgaacttcgaaaggaatttgagtacttatctatttttagttatgtacgatgacgtgaatcagtccaatttgtgcagattaattcaacgacgtcacttgaaaaagaatggctactacggagtactccgtagttgattcaagcttgagatccactttgacactcactctcaagattgtagtaagtaaaaaagaagcaaaggtacggaaagaccgattttgtaaaaatgatagaaaaataaaaataaatgcatcaggagggaatcgaacccccctcgccagtttacttgataaggagatttcctaatctggaagactagcatcataaccactagaccactgatgcaatggatatgtttaaacgtcaaccagtatggttcatcaagtagagttacatatatattggtctccgcactccagcatcatacatgtctgtgaaacactgtctgtccagacatataatcccggcgacgctccactaggagataagggattgggcaatgtcgaattcaataatagatactaagactgtgatggctacacattccatacaacatggttacagtctgcgggctccggcggccgatcaccttagaggagataagtggcttcaaattggcaaaaaaggagaatcatctccctaagtcaatcaatgatattttcaagttgatagagcagatgctagtgagaatgttggtctttgtcttgctgttgagtctaagcctacatccagctagtcgccagggcaaattgaatgatttgtgtagtaaattgtcctgtcgggctgtatgattgaggtaaatattggtgactgattactcagggcactttctacgattgatggttggcacatctgttgaatatcaatatcttattttctagcgctgtgatattatctgcactgccagttgagacatctgttgttctgcccttatatctagatatagttaatttgctggtaatcacgtagcagccatatttcacagggatatacgatttgttagagcctccccttggctattggtcctgggattgatttttacacctgtgatgaagaggacagcgttatatatctttttttttttttggaaagaggtccactgattgagtaaaccacctttataatcaacagccgatcctaaattgagtgtggcgagataaaacaggtatgcaaatgcaacgatgtcaaggaaaagaatgaatgagcgggagtagtggcatactccctgcaagttatctgagctacttctctacagccttgtcatggattatcccaagcgacagcctctaggtgggaagcctgtatggcttgcaaatccaacgctcaatatctcacttaagaattgaggtgttctttttctctctcttttgagtgaggacctggtagctaagcagatactcttggccagccttattcggatagtcataagctgtctgttgcaaataggacgatctagacaactcagagcccgaccagtccgagatgagggtgtaggcaatcaggattggctttgtcaggaaacgcacaaatagctggtcttaccagaacctgcgtaatcatttccatagatttcaatataattgtacacatgttcgtagtaaagagaacaaagttgaatagttggcagtcaaacttaaacttaaatctatgggtatcagcgtctacaccgtagatgaaacggctatgctaggggcattcgaaggaaacgcagatatattgtcaacgccatatttgtcgaccaggccgcgtttggaactcgcagcacgaacggcaagcaagtcgcaggctgctggtgttagaggtgttggtcgctcatggtgcttaaagtacaaatcctagactatgggtagccaaattgtgtccaaagtcaatgatcaaaggatgaagatagaaattttgcattgtaataaaaaattggagagcggggggggggggggggccaccccaaaaggaaannnnnnnnnnnnnnnnnnnnnnnnnnnnnnnnnnnnnnnnnnnnnnnnnnnnnnnnnnnnnnnnnnnnnnnnnnnnnnnnnnnnnnnnnnnnnnnnnnnnnnnnnnnnnnnnnnnnnnnnnnnnnnnnnnnnnnnnggaggcgggggggggggggaggaccaccaccaagtgtaattagagaaacactttcttgcaaaccttgccctgcgaaggttccgtctcttcatcgtttccaatctcggtaatttctacttccttatatcagtgtctaatgtcagtgtcacccaatgagttaaggggcagtggcttgaagggacattacagtaatcagggagccatatctaacgcctttcatcaaagcccaatcccaatgtcgattagcgctagtaacccattttggctgtcatgatgcgctttggtcttcgaaactacagaagcactactaatgtaggtcattcttattcctactcgaattactcggttcttggcttgtcccaccactgccgcccaaagcgccagttggggctcggtacggatgccatttgggggcactgccagcaaaggcacgtttctagaaggagcatagcgctcagggtcgcatgcacccatctgatgcctgaatccctcgatctcaagtacccctcgggagctacctcacttttatactcccccgctcggccaagccgaatttcagcaaatggtagtctccgctttatcaatatttggcaggtgtccttgaggcactttgattagaatatatctcccccaactttagtattacacttgaagctgtctatgtacacaacatagccccgtttgataagaaaaagaaagaaaaacaaagcacatgatcaagcgcagcagaggcaaaactatatacgaggccaaaaacgatcagatgcatatcaataagacataagacaccttgctatgccgatgaaggggggtaagcgggaaacaaaaaagtaaacacacaatccaagggcaacgggtgtattatccgaaagtgcccaccaataccgtcaaaagccgcctgtcattactggatgttggatatccaaagtagcgggaagtagtattatgacgaaagatagggctgcaggtgccccgaagcagaaataacctagtttgagccataaactttgatagagccgctcgggccgcctgtctttttctctcagatgaccacggcatcctcgtcccgatagtagtctggatcgtcaaagaaaactgcagactggcgtcgtagttcctcgatcacgcttccccgccgggaactgggggtatgaggacgtgatgagccggttgattgagacatgctatctgacaagtcaccaaaacgcgactcgttcttgtagctagatccatcgcgctcggggagattttcatctaaacgctccaccatagagtctgcatgttcattttcccgattgcggattcgacgggacaggatcggggagagcgcacgtccacccgttctagattcttggagtcctttcatgatcgcattctcgaccttgagccggttttggataaattggattttggagaaagtactctgctggccgacatgtatcatgcgggcgagcctttcaggagtgggatcggaaagaatgtggatgaaatcggaggggatcgtttttggccagatagttacagtgccactgaacttttgcaaccagatctcgctccaatcctggcccaaaggtcgtgggaggagctctaaatgccgaagaactcgaagccatttgttgaggtctaatttgatgtactgctcgattgcggtgccgaggaagcccccgcgccagccacggcccctgcggtgtgtgactggtcgccctactgtccctctagaactaaagaagaagaggttgatgtggggattgacctagggtagtgttagtggcaaaggttaaaacgtaggaaaggaatctcacctgggatacaatcgtaaagttgacgttgaaatgcaggttcaacgctttgataggtatatcagtccgtaggctaccatccttccatttgtgaccaaacgaataaggcgcgagagtgccatcacgctttttagtcattaatacaacagggtttaaaattcccggaacagccgccgaagcaagcacggcactccatatgacacagtcggggcatgtcagataattggctaggatagtcggtgagtgaggatctgagggcacgcaggtgacattcaaaatacgcccggtccgctcgtaagcttcacgaaaggtcgttgaacccctgcagaaccaggcgcattgtcgagcccagtccatagtatcgaaccgagcaccagttcgccaccagcgacggatccaagttgccagtccttcatggcatgcgcgaatccgatgtgctaaagctggaacaagcagctgctttagctcatcatctgtccgagttgcgactagtcccgccacaagtgctccgcctgatgtgccagttatgatttctgggaggacatcattatccagcagcgctcttaccaccccgaagtggtagtaagcgaatgtagcaccacccgaaagacaaagagcggtgcgtccaaagtttgtatcgaggtgtttgaaaagctcatacttggcatccttgtcaatctgtttgttgtccaaaatgatctgtatgcatgcgtgcacctcgtcgatgtattcctgaaccagctcctttgttcccgagtatgtctcgctatatattcgaggattttccacaccggaaaagttgttcttgacgcaagcctctaaaagtgcttgaagatcttcaatagcaggtacctcgctagagccgacccgaccattctccatttcccattccaccttcttcctcagctgcttcagctgcgataccaccttgttgacagtgaggtggtcgtaataagcgtattcgtctgtctttttccacttttcggttccaagatggacgtccaatgcttgagccgctttcagccagtccggatagtttttctgtgcagatagttcctgacgcagcctttgccttttcccccgccatgtcacccactgctcatacaatactatgtagacacgcaccagagcatagccaaagctcagtactatgagccacgcgaatacaatgaacaggaagggccatttcaaaacagaatatagcacgccttccctcgtttcatccttgcttcgctttggtgttttgcggcggccacgattcttgcggactcgttgattgattgggcgccagtcgttgatggctgtcaatggggaggcttctggggcattcagcgccttctcgaatcggtcgagttcatctggctgaatgaagtcgcggtcgtagtcagggagacaggccggatcgtaagggtcgtacacagcaggtttcttcttagtggtcatgttcaacacattctgaatacaccaacgaagattttgagggttacaaaggtacctggaaagctggggaagctacgttgtacgatcatgacgttggcgtcacgtgtagtttacctccacattgcggctagtgtgtttccggaaatagctagtctggttttctatttgctgagtcatccggatcctgccccgccagataagaaagaaaaaacacaactacaagaaccatccggtagctaaagagcaattgcttcgaattcagaagtctgttgctcttgcagaaatgagggaattatgtagatccactagaagcaatctcttcaatattaactttgtcacagtcacgcaatttacaacctcgctcgacattctttgtatcgagagtgaattaactttgagaaactatggcaggcatcatcccaccttgacatgctgcggcatttcaggacgacaatgccgccgcccgtgcgatgtcattgaaaaaaaattgtcggaatgtacccctccatgtacctcaccagcaagaaatcgacatccctccatgcgatctcttattcaatggtccaatgcgcaattagcggggtcgtcgtgctcgcctcccgagaccaaatgcgagatttcttttgttcccactcaaaggattatactacagctcaccgctacatggtgggcggcgcgaatatctagaattatattgccggcccgtgattggtaggcgtctcggaagagtttgtttgtcgcagccgaattggaggtctaggaaagcatcatgggctatcagcgggggtgaacattactgtagccatatgcataaagtactaggaagtgctttgtgctcgcggtatcggacatcaggtaccgagtagtagatcggaatgttagccacctttttatattatacagggaagcgtcatttcggtcacctgatgtaaaaatgaccccttatatatcgaggatgttttgcagcaactaaatatccttagcgtcgtcataggctgcagctgtccataattagattcgtttaggggcggttattccggacaattttccctcttggccatgttcgtcttccatgctgatcacaacctgctaaattcgtgaatgcaaatggtaaaatgcaatatgttgcgagtcatgggtacttattgctactttgcgattctacaccgtacactcgcttatactagcgagttctaagcatcatttttgatgtgtagccttcggcttgtcttgtaatgatacacaacgggaagaatatttattgtcccgtgttgcgcggtaaccgctcagtttattgtgttgctttaaccttttgtggtatccctgaacgtgccgggcgcgccgagttggagtgcggactcatgtcagggttaccctgttctcttgagagccttggcattttttggtatcttcaatctaaactcgaacccatcattccccatttggccctatgcagatcatggatcttccctcgcgaagtgttgtggcgttgtaggagccggtgagaaagcttttccccgcttacaaatttaaccccagtaactcctttccgaaaatgagcggcaaccgcagaagagaccaagctcagtgagccacattcgggtcttggcaagggaatgatgcgtatgccaatgacccgagccgtgtcaagccaatgaacagcatatcgcactgcacacttggcggggatcgtccaagggtggggaaaactgtccctcggatctccgaggccgggcaacgcccgaaatactcgaggccaacttacagtaggtagcgtttgttgttatgatgatgatgtctacggtacggagtcaacatactgaatatatacatacaatattgggtacacacagaggggcaatgtagatcgatccgacgtcatgtgccccctcttggttatgtaaaaggtatcagttcaatgtgttcaaacgtttatggggtttgaaaagactagcgtcttattttgtttcaagacatacttctggaaataacagggggttgtccatattatgccgcacatacaaagtacatatgcgcttcatagcacacacttcgataatggcagggatgctgtagactcctcgcatgaaaagtgcagtgtcgtatgcagcaaggctgggatctgaagttgaaccgagcgtttgcggcgcatttacataaatgccctggaatgttaagttaactagctctgaatattttgatctaactacaattataccccgcgctctaggatctgtcgcagggattaaaaaataaaatcagccatggcaattactgtgtccaaagtctttgaagacgcattttgttcttgatgctcaaatatgaaacattagcaatataaactgatgtcaaccacaactattctaggggtcaacggtcaacacccccctcatagagataaaatacatagagagatgaaggggtaacatcgaaccgtgggttgacgcccttatccgttttctatagaagcggtgtggctgatatcgggacggagtcgagtcaaaccatgggtcagatgaaaccatatctacatctcggtaacactaatgactcgtacggtatatgttgcagttgatgtcatctggagtatatatttaaagtaaaccaagccattttatatttccgattcccagcgtctccactcatcgagaggaatgtcagatgtcagtgcgagctgacggactcggacgatcgcagatagcgtaattgcgaattctagggttgaatgtcgctgattcgtcctttgacgggaaaatcaccaaggtatagcaccaaccaggtcctctgttgatgctcattctcgccgcattcactaaatggctacatccactatttcccctttaaggagaaaaggcatcctgcgagcatgcagttatcctcccatgcatgtgcgcccccgccaatcgtgtgcctcgtgcgatcatttgcttccttctcaaccctgattcgatcgcatgcacccccttcagcacctacaggtgaccaactacatattcggtaagggcacagcctatgagtcgtcctctcgtactctcgtactctcggggtttgcgctgaagagtcagaatggcccaaaaaaatagatgatactccatatggagtagatgagccggtaaaaaaaagtagaaaagcgggccaacagaagcacagggcaactaggccagttctcggcattcccacccggtctgcatcgtggactcaggttgcctgcgtgtggctgcgtcggagattgatcaacacgccgccaccgagatgggactcatgacaactttcaacagttcctaggaggggtgggtttcaactgcatgaatgggaagacgttaaatttttttttacgtcgatcaaagagaggcccctctgtgctccgtacaggacccaccgatagcatatggtctgagtttccttgctccacgatcggctcataatgtactccgtagactcaatcatgtaagaggaatcgaaccatcacggactaatatttgctcactattgagaaaaaaatttcggctgctgcttatagggtaatatgggggcttaacagggtaatcgttgactccaatcgtttcgatagacgcgggagagaagtcggcgaactaaattcctaggcgcagtccccataggcttgccacttcccacccgggtatagtagctgcattagtggcagagacttattcatattagtgatggttatacggtattattagactaagtacggagtatggaccactccgtagtctgtgtcttatagattacttggataggtcaaatttgggggaagaggacacatgtagggaagacgaggcagaatcggacaattgcattcataaaagcataagataataaaagatccaaagtagaaaccgaaatctctcggaagtatatcagacgactatcaggagaatatgctctcagctgataaaagaaagtggaaatcaatgtttccaaggttgtaaacgtgtattacgggcgtatatgcttgtgtattgtgttatcaggataaggcgtattattttagctaaataattggttaccccgtgccaccaccttttccctcttcaccttttgtcattcctctccaatctctatctcacttttcgaggtctcagagaggagatcgagtcgttctttgacactccatattcatttctcccaggtatcattcctcctccctcacctgcctcccggcgtccccgaaatccccaatgagactggtcaatctcagcacaccgttgctaaccttcgcattcagagcctcgattgctcgctttttttttgggtctcacttgggtcgcacaagcaagatgtcgactacatctagcaacctttgttgagccatctatcttcagagttctcccggtccatcaccataccccccgcccccgttgacgccatggagaaaatcaacaccggggatggacaacttttcatcaaggtttgtgttcctatgcagctgtcgcctgatcattgcgatgaccagagatcgtctgagtgcttggtccgatagacagctgacgcgcatggttgctatagaatgtcgctagctacgttcgcacacacgagaaggccctcgccaatgcactacagctccgtcgccagcccacaaaaaatgtcattccccaatcgcccagtgtacctttgacccctggtagctctttcgcctcgacttcgtcaacactggctgcggccttttcatccgcagcattgaaattcatgtcgcagaacgccaaaaccgccaaactcacattgactccccaccaccttttctaccttctctcccgttttgaagaattgaccattgccgttggtcctatgaacatcaggctggaaaacattcacaccggggtttcgcaatcctatgtttcattcctgaacaagccccaacagtctcggggcgatcgggcctccatccattcggtgtccagtgtccgcagtgtgatgtctggtatgacggacctgtggtcatctttccgcatcggatccaaggataccccgacgaagtcggacagggccaaggccgctttggaaatggacttgaagtatttatactctgcctttaccaagatcccgtgtcttcgtcttgcccctgaccaccgtgctcctcttatctctggatatgaagaatttccttttgatacggctgtgccgctgcattccttcaagaatttgagcgctttagagattattgatttagactaccgttctttctatggctgggacagattgtctgagcaactacgcactttgactatcaagagaggtcacctggatgatccggctgatcttttaacgagaattgtgttggacgacattgacaaacgccgccgtcggtctgctaagtcccaacagtcgccttcactaggatgggccagttccagcagtcagccgtttcacactcccgaccaggccaattccatgtcagcccctggatctcctatcgcggacacagcattcggaactagcactagtcccagatctgccccgatgctcagagctggctcggaaggcaccaaaattcgccccagggccgggagcgtctctccaactcggcctacgacaaagcacagccaccgtcgaggccagtctcggcaaattcgccgcacgggctctgcaagctctgaatcaagcgagacctctaacagccatcgaaatggaagctctacaaaccttctcacagacatcctcccgccttcaaaatggcgattcctacgacacctgggccttccggaaaattccctgacatccgtgtctgctgccagtcttgcccctgtagccaacagtctcaattcgctcgatctgtcctccaacctcttggcggagattcccgacggtgtggcatcgctggtggcgttgagagccctcaacttgtcgcattgcatgatcgagtctcttcactcactcacccgaaatcctcttcccgccatcaccgttctcaccctccgcggaaatcgcctccgttcgctcgcaggcattgagaggttgctttctttggaaagattagatctccgcgacaataacctcacggacccgactgaaattgcacgactaaccagtcttcctgaaatacgcgagatctgggtatctggcaatccgtttgtcaagactcactccggatatcgagttgtgatcatgaacctcttccgccgcacgcctggttattccgaggacatcataattgacggtagaggtccgggatacaccgagaggaagcaactggtggagcgagttgcagagcctcaagctgcaccgattgtacgctccagcccggcggatgaatcaacggtcgtacagaagtctactatctcgaaagtgccccacgatcttgcaatctttaagccccaagaagacgagcgagatttgcacattaatggcacacagctgaaggaaagtgacgggggaaccaaccgtcgcaagaagctccagcgacgtaggatagtcgatatctcaacagacaacccgtttaccaccgatggtctgggcaattccggaagcctggctctcccggctcttccggttcagcaaattcaaccgccagttgaccgtccgaccgttgtccctgttgatcagtcatggaggctggacagcgctacgcaatccgggtcatcaagcatccgaagccccggaaagcccatgcattcgccgagtcctcctcttctacaggctttgcagggtaaggacaggacaatggatgaagagttttgccgtcagcagctggaagttctacgtcaggacgtgggccataaatggttaactgttcttggcgagaatgactgggataattcccgtaaggacttcgctcacagctctggggcgggcctggaccattcccctcacatttccccaccttcactcacccgctcgaatacccaagggatattgagcggaaatgcgcttagcggataagatacgctttttttttacagtcctcttttgccgggactccgtttgcctctcacgtttccgtttcatgacccccggagtctcttcgtcgtgggtgcgacgtttacctgcttcagcaggtttttttcatctcttttcctcttatttacgaggacacaacttccctcgtacggtcccccgggactcatttgaacaacatattttcagcatcagcagctgatcattctatgcattgttttcggcgttggacgacttatgagacatggtgggttggatgtatgaactatttacggccgtctttgctttccttttcactgtttcatgtctctattcccttttcccaaaacgcatcctgcgatggcccttgtttttgggggtcatctcgatccacggaaggcacagtgaaagacatctttttttcgattctagcgttgtactgtatgattctgaatttcgggcatgttggcgttggaaggatctttgacttgtattcccctcttgttacttcttggtttttcccttgttttcaattccttctgtgtgaagctgcatgacttctggagtagcattgtatgagactagagcttggagctcagagctcacagctcatttgagaaaaaaacgccaattattttggaggtctacttttctactaagcatgtagatatccattctatagagtagaggatccaatcgacacacaaaaggcattagctctcagtctagatgcgctatccaaactatataattggactattttagttagatcagcctattatttcgtgcttagaccccgtttggcgtcgagggcgttatgagtcgagacctagaatccaccctccccctctatgcaaattttttgcatcgtcaaagcgcttcttgtaacacggaaaagatataatagaattaatagaataatcgaatggtcggatgaaagtagaagggggggggagttcctttataagcgctctatatataacaatatcacccccctctctctccccttgaagatcaaacacgcgcaaacacaaaataggaacttcccgctttcttcgtagaaaagattctcttctcttcaacattcaacctcatctcgatcacgttcacgttcacgttcacgttgctttgaaagagtcaaactggtctgactattatacacccgagaaaattttctcccttgattgaaatttgccttccctcggaaccccatactcatctcggttcatctcgatccatctcgactcatccaccctccgacttctttcatcccaagtcaaatcgataagagctcagtgctctttcgctcagcctcgtttatcttgtgaggcgtctaggagctcattctcttctccctctattgtgcgcgtacacaacaactcggataggcaccaccgtccacacccgtctggcatctccgccagaactggttttttttcttctttttgccgtggccgttggggcccttctctagatctgtttggtcttgcaatcttctgtttggtaggcatctattccatttccctccgctgctgcttctcccaacacctccgaccgccaaagggggagaaaatccagcgaaaattttcgagcgcgctcgtcaatttcgcttcaccttgggacttggaatacagactagacttcatctcaatctgcgacgctttattaacttgtttttccaatagtaacaggacatagccgccgcgtcatcaaatctctgttattctcacccgatcgctccggaagtctctcttccaccattcgcttctctttttcttccacccattttttcttctttctttcgtgttttcgttagacattattcaccatggccgatcaggaagtggatctggactcgattatcgaccggctcctggaggtgaggggtagccgccctggaaagcaggttcagctgctcgagtcagagatccgtttcctctgcaccaaagctcgcgagatcttcatctcccagcctattcttctcgaactagaagcgcccatcaaggtaagctgtctttttgtgtccgaatcgttcctcggaatcagcctccgtctaacatgcgtgtctcgctagatttgcggtgatatccacggccaatactatgacctactgcgtctcttcgaatacggtggtttccctccggaggctaattacctcttcctcggcgactacgtcgaccgtggcaagcagtccctcgagaccatctgcctccttcttgcatacaagattaagtaccccgagaacttcttcattttgcgtggaaaccacgagtgtgcctcgatcaaccgtatctacggtttctacgatgagtgcaagcgccgatacaacatcaagctctggaagactttcaccgactgcttcaactgcctccccattgccgccatcattgacgagaagatctttaccatgcacggtggtttgagtcccgacctcaactcgatggagcaaattcgccgtgtcatgcgccccacggatgtaagtttctcccctcccctctggtgtaggtggttctattggcagcgaaaataaaagtggcagtgtggcgctgggttcgtttggctgaagcccaacatcgctgactgaaatagattcccgactgcggtctcctgtgcgatctcctgtggtccgaccccgataaggatatcaccggctggagcgaaaacgaccgaggtgtctcattcacattcggccccgatgtcgtctcgcgcttccttcaaaaacacgatatggatctgatctgccgtgcacaccaagttgttgaggatgggtacgaattcttctccaagcgccagctggttacactattcagcgcgcccaactactgtggtgaattcgataatgccggtgcaatgatgagcgtggatgagagtctgctctgctctttccaggtgagttattcaatttttatccccgagattgtttctaattagttcctaacctgctctttttttccttccgatagattctgaaaccagccgagaaaaagcaaaagtacgtttacggtggcatgagcgccggcggtcccgtcactcctccgcgaaagcaaaagaagaaataaaagaatcaatacgagcttccccatctgcagcaggttcgggcggagataagcctttcacaaatctctttaacagcgccctcatgacatcctccctacaccccccgcgagtcccacccccggatccacgaaaacgatgaacgaccgaggaaaccctcatccgcacccagggcagcccgatattcctcttcaactcccgcaacgataatatcagtcacattctcaaccctccagaccccccgggctctctctctcccagtgcgacatgcgataaaaacacaacagtcaccccatcatttcctggcccgtgcgaccctctgtacttccggagcggagttcaaatgcttatttcttcgttgtttctcgacttctctgtctctgtttctaaccatctggactggaatgtttttcctttcggcatcctgggaatggggaagggaaactggttatcttttctcttttctttctctttttcttactttttattgtcctgttccttgaccgcatgtgttgttgttttcttatcgaatcctattcgtctttcgacccgtcttctagtccgacacgtacgaggcgctagtagtacctttctctgctgatgcatcgtataccggatttggaatgggtgtctgttactagcggtgttttgtgaatctagctcgaccttagaatagtttcttcggagatctagattgtatgttatacgggctgcaacgattacaattgaggttattaggctatgatatctatcattttcggatagttaaatctgtcctggcattgatactctaactaatacattcatactccaatcaaggaattggaatatgtaaatacttcgtacatgtagtatgtgaccatacatacctgaagtattctatgtagagagctagcaatagcaataatagcaatcaatatcactatcactatcagtatcaggattcagtgcacactcctatgtttgtaccaagaaagaagaactaaattcaagtctttagactatagtaactaggaaaaaccagctagctagctcgagcaaaagcggagaacaaaaggagcaagaattgaacaaacgtgacaagatcaggtacagcgtagtcgagtgacacattcaagacgtacaagtacgtccggggtaaaacgttggattgggtttgtgggaggggggtgggtagcatagctagatatgggatgttcgggtgtagaggaatgtcggaagaagccaaagccatttctttcacttggacacttggccgagtggaatgatatggatttgaggttgacagattgaggaaggtgatcagttgtcaggagaacagggaggaactctgtttaaacgtattgggacaaccatctgattccctcgccgtatcctgtcggggaaaagataaaggttagttatgattgtttcaatgtctgcttagccagcacggctccagttttcactgttgggactggacgaaactcaccctgtcgcataacaacactgcacatgaacacctcgatagggcggataccctcgagagggaccttgcccttaccagtggtctggtagagaccgagctggtggcgcagctcatcctcgctgacagcatcggggtgatcgatcttgtttccaagaacgaggaagggaaccttggagagctcctccatggcgagaagagcgtcgagctcagccttggattcggggaagcgctcgtaatccttggcgtcaaccaggaagacgattccgctcacttcggggaagtagtccttccagagacggcgagctgaggggaaaggtaggtccgttagttatgttcagtcccatgattcattgtggggggtttcgtgttgcttagcagtatgcttgcgcaacatcagaattccccatcaagagcattactcaccctgctggtgaccaccgagatcgaaagtcgtgaagcggttgttaccgatagccaactcctctgaggttgggtgtgcggtaggttgcaggacggcgacacggtcgttctgttgaatgtcctgtcagcaaacgagccccacacaacgtccagttcttatatcatctctcccgtgctatatccaagctccctgatctgtacagaaatccagcgccaccagactcgggacctgtagccagcggaattgaacaccaaaggactagatcttctcttcccaaactcaacaccaacgctcaactcaccttcaacatgtgcagcagcgtcgtttttccggcattatccagaccgaggaacagaagcttggcgtgcttattgaggagacccagcgaggccaagatatcgtaaactataggggaaagaagcgaaatcagcaaattgcaccttgcacctaaagacgcacgcctcgatcacaagcagccggtaccgcggcacagccgtcgcatgactcgacatcagagttggaatgaagacatgcttagctccagtgcagctgcactgtccggggaggtatctcgttcactcttcccctgtgttcgagatcggccccggacgtcggtgactgcaggtgatcgggagtggtatcgggagggtacttacaccagttaacgatccacatggtgaagggccggagtcagaaattattgggaaagagggtgacgagcggggatcacagattaagatcagtaacaagctgattggggggatgtggatggacggggtggaagagatagaagcaaagaagacaggtttgatgttgttttcggggattggattggtgccttaggcaggaagacggaatcctcgcgcggcggtgacagcgataggctacgacttcagggattcgggctgatttgggtatatacggatgggtttgtaaattctctgtgatttgtttggggatattgatcataattgcgtacttctctctgaaccttcgccgtggcgaagacccgccactactcgatcttgttggtagtattactgttatcatccaccttaggagagaagaaggttcatctaaaatatatttcatattcactcccatcaaactgatggatctctttattcacaatgcagaaaagccagataggggtatatgcaccgcagccatgcaagacaacaaaggaagcgacctccagcaagtcccaaggaacgcagtaagggagaagagggaaaagaatatagatagacttccgacagaaaatgtaaagaaagaaccacctccgtgtaggaattattgaagagaagggggaaaggggtaagggtaaagaagccattcatgtggataacacgaagtcggcgaatatgtgtaagaaagcgaaaggcacggatcgctaaccgagcaggataacacaaaaaagaccctcgaaaccagaaggtcccgaaaaagtaggtatgtacaggtcaaaaaaaaaaaaaaaaaacggaggtgtgaaacttttcatacaagttctatgggtagggacacctaaacggataggacgagctgggcgtcttgagcgacgccgtaagctctgcacctctcagcaacttcgaggccaagctccttcatccgttcggctccatggcctggaataggccgtttgcccatctgctctttggcagctttgcggcagtgttgacgccagaacttttctttgcgtttctggcgcttcttctcgagcccttcgacaatgtcgattgggccacgagtgtgtagctcacgggtacgtgagtgttcatgctctggggactcagagaatggtggaataccttgccatcggtgatctttgtctagaccggcgaagaaagggttggggacacggggaagtgacttggtacggacgagaggccggcgctggaccaggtggctgatgttgacacctccggcagactcaacgatgggcatatcctcggtgagttcccatgtagctggggtgggcgacttcgctctcataggtggggccggggacttgagacgcttcggagagatgcggccagcgcgagggggtggcggggacatcagacgtctgggagagcggaggggtgattgcttgcgggcctcgccctctggccgtcctcgggtaatttcctcgcggtctcctttggaggataagctggagagctcttcctcgggttcgaggtcttcattgtcttccggatcgcttgtggggaagctggggtcgatatcctgcgggatgataatttgtttgagacggcgccgttcttcgaggcaagatttgtaggcaagttcgaggggacgatcctcatcgagagttccacagacaaagtcggtactatcaggaaggttcggggtcctcggacgaatcctaatgttcttggagcccttcgaagtgcgacggccaccgatcctttgtacaggggctggaagccagttcaagtgatcgtccgtcatggagtcgaaagatgtgttggaggcccggcgttccatggttgagggacgagcatcgatgggtgaactggttggttttgggacacggtgtgatgatccccaaaactcgatatccgagccatcatcgtcgctctcgtccgactccgcgaagccagcctcgttgtccgattcattgccgtcgtctgaagagaagtcgtgcacagtctcgtcgtcgtccggaaggtcttccatatcctcttcttcatccaaagcctcttcttccgcctgttcgccgagccgtcggatggccatttctttcttcatgcagtcgtccaaagtgatcttttgtgtatagtcggcctccctgttcacccattcatcatcttcctccgtagagctagcaaactcgtggaaccgggtggcttcggattcctcgaacttgcccagtccactggtggggatacccttgcgctctgtagacgcagagacagcctccttagaaagctctttgggggtttcttttaatttgggagaggctctgcgagcaagaggtgcaggggaaccgcggtatcgcggccggagggagggcttgcgcgccggggatcgctctctctgggaaacagtctcccgtccagggcacgcgaaagtaagtgtagttctgcgcttgaggacttgaatcgagacgtcttccgtgggaagctcgttcggtgcttgggctttgggtgggagttcttgtgacccagagggtgagacgggagatcccagctcattcttctcatcagtcttacgaccacaagcgaagctaatgcatcgtttgcggccaaggttggcctcgacggaagtttcactggcatcaacgacgttcactttgggagtcaaattcttctttccaatcaaagcagcatttttcatcatctgtggtaaaggtgggctgggagtgttagagaaagatggactcgtgaggtcgccgtcgctggtcaactcggctgttgagacgccactgaggttgctgtgataggatcggtacatgtaggagtcgtagtgggaggtgcgaggatcggttggggacatctccgggctgctcttcaatgcgcgcgtgagcagtgattctttgcggttcgttggccgagaaagcacgatctgatcggagttcatcgaagtagcgtgcataacgtgttcagggggttcgtcgacgtcctcggccaagtcggcctcgccgtggaccggcttgctggacgagttgggcgagatgagcatcttcaataggttgtgaaaagagaaggttctttctctgtcgcgagactgtgccatggtttcggaaggtcaaaaagaaaaagtgttcacggtatagttctcaggtagagcaaggaggatgtgggtgaggcgagtggcgtaggatcgagttgaaggcgaggtgaggatgttgcttgaaagatatactgaggtctttcatgcaacaaatgctgtccttgataataatcgatcaatgttaaatcgatcgaccttgagggcagaacaagatgtcccgagcgaggactagtgtcatgatataaaccgcatgactagggggtttcgagacgaaggagggtattcgccaagatcgataattgtccctaagaatggccaactcaatgctgagggagactagatctgattctcgaatacctccaggatttgaaggtccgtgctttcggagggatctcgatcaagaagaaaaagcaaagtcaggaatgtcgagaatggcaagaaatggaatggagtggagattataaagagtaaagaggaataaaaaagaaggggaagttcggggaaaggtcgacaataaaaacagaataagaagatctcgcatagaaaaggtgcaggggtctctccgatgtcctgggggggaagagagagtgtgggagtgacgatacggcaacccggcacggccgctttgggactagcggcgtttcccttttgaaattttatttctttcttttcccacgttttttattttttcaaattttcaatttccgcggtttttgtgtaattttggcttggtctagccggtttgggatttattcttttctttttcttctctttccccccattgacccccccagtgaccccccattttcccaaattgccttggttagaatgtccggagtagggctggagactccaggggccgtagcactttctgactaagaaaagctggaaatgtgtcctgcgactagacattggttcctgcgctacttgtaccgtaccatggattgtatttctatagatattccgtgtctttatttcggattcttattttatttcgtttctatttctatttctttatctcgatttcatatatatctacaaataaatacatcaacggtttcaccttcaagatcgaggtcaattgattcaagtggaccacgatgaccattgtctgttcagcgctggctatgagggattttgtgctgagactaaacccgtttcaggctcttccttggaaactccccaagctgcgacctctaagattattacttgccgtggccgtccgaatccacttgccaacacaatcaaatcctggtaccgagtactgaagaagaaaaaaatcgccttgatatcttcaccgtatattgtagtgctatgttgtacatcggagaccctcggtaatttttccattgcgtatgcgtatggtcatcttccacttacagaggccattctcatagtgcaacccggtatgaaaaagaaatatttccatccactcgcagattgtgcctgaacgctaagccgtcaaccttggccgcatttgccctagagctaacaggttgaattctcttactcgaccgaaactcgtaataaggaaatgatagctgaaagtataaacgcgctgcacacgcttgtctacatgctcttggcgggtttcgctgagttctcgagtcatatatctgaatgcttcatgttgatttcttaatgcggatgactccttcatctgacgtagcatccgcgggtgacatggaatattagtcatttactcttcctccatcctcattccttccttgtagcctcacaccacttcaatcctccgatgacctaactccggagcttcgcggatagaggaggcttgggaaattggatgttgcatatcgtacaatatacaacatactactccgtatataccttacaggttgtgcacataggtatccatatgtactccgtatacggagtacatatggatacctatgtgcacaacctgtaaggtatatacggagtagtatgttgtatattgtacgatatgcaacatccaatttcccaagcctcctctatccgcgaagctccggagttaggtcatcggaggattgaagtggtgtgaggctacaagacacagagtcgtatccactggactcctaactgtacctcaaaagaaactcttggctctgcttcctcccggtagatcagtcttggtatacatgctgtacatccagtaatttgtagatagaattgattattcccattggctctcatccagtggcaagtcccaaggcagtcctattttctagggatgtccactcagcccttcgccagcacggcctcgttcgacttcgtcattccgaggcgaagcgatttggatcatctagttgggcatacaatcgatctacaatacatctcgcggagtacaatgttgttttcggcagctttgtttatcgtcatccatctccacacaaatcaccgagaccagaaaggaaaatccctctccatgcccgatgacagacatgcacgagcaacctgcattatgttgtaaaggcttacgaagactcttacattaacaaagaacagcggtcagccgcgatcaagatctgccctagatcggctgaccgggcaagatcttccctgcgcaaaccgcaatcgcaaaccagtctccaaagtatatcgcataactcggacaataaaaaaactcccgccgaaagagaagaaaatcttgcaaactccaccagtcaccaaaaagatcaccgatgctgacattcacactggttcccggaggtatgcatactgcagccacaaccccccattcaacctgtagggttatgaacctctgtttagatcgcgacaagcttctcgaatgggaggagatccccccacagtccatctgttcgaacaggcatacccctgtaaatgcaatccaagctcactgcattgcatatcctcgagccgggtgaccgtgggaaatgagttgagtttggaatcgaattatggaagaagcttgttagcaaggcaacggctttgcgacagggattggcctggttcgaagctattgaattcatctagcagttttccctatattaggtttttattctttactccttcttcctactagtgtacttttttttacgtacacaggacaaggacacaaggacgattgtctatgtacagccgagcgatcttcctcaaagaacgattcactgtatttttagtatttttccctcttcttcccaatacggagaaggcagccggggcgcaaaacaccgtttcgaaaatatacatcgtattcgaaattatccaaggatacaagccgcttcctacctcctccgtttacaggacaaaagttcccgcactgacggcaataacgcagacgggaatataaaatttcttggccacccccatcagtccttggacttggacttgggttcccgcaaaaacgggaatgggaaattaaaatgagatctaatcctgagcggcattgcggatattgtggaatggaccaagaaagacccctctctcccgatccctcggagacgttctcccaagtggagtaggggaatatttgtgggacgggatgttctatacgatgagaatatggtttgatgtcaatggctactagtagtagcgctgtgttcgtggcacgatgggatcgcagtggcaatttctccgggcaaaattatcgtggcggccattcaattgacgagtcgcaatctgacacgctctttattacttaccccaagtcttgggtgtaagtaaacgaaggaatagtacgtgtgcccagcgcaataaggtgtgaactgtgcaggtggggatacggactccggacaaaggatggcacgagcgggatctttatttgacgcttagaacgtatcctcctcttagaaccccaaagtgaagcgcaagtgtatcataatagaataccagaatgggttgaccgggaacacaaccggggaagtggagttgttgagaagtaaagagattggatagctgcaagctgcaatgcatgcgcgataggcgggacgggtaaatgggttggaattaatccgagcatttggttagtacggaatacagctgtgtatgaggcattttcatattcctccaccttttgaactactgcactgcgccagatgcagttgcgtacttaagccctgttggcgttctgcgaattgactttgggtattcctgtgaatcctgtctcagacatatccatgttcttccaattgacttcaatcactatcccaataggctattcgcctttcgttctaccataccggaatgtcactgcgatcttggcagatgggcatttttcccgaggacaaagatattgcccgacatgtttcactcgcgcaaagagccatacaccactaatagactaatcgttggtctgtgcaggatgtctcaataccccagatcttcgccacatcaaagaatcaactgccgagtcggactcggatggccaatgccaatgccaagtccaccccgtgcctcataccgcgaacaccgttccattgagcagatctcccccgaacgtcacagcctgaacatcaacctcatgacctccccgccaagatagacctgagggttcacaaagtcatgctcggcaagacaggtggaacgggcagatcactgatccacccagcagtgtacagtgcaaggagatggtcagtcgctctaggccgcaccggaggaatgcttggcgacggcgcgtggtgaagcaatctgccaagatctaggcattggatcttcagaatgcgcccggtacgacgtgagctgtggtatggagccgtgctgaagaacaatgggtatttccggggcgacaatacggggtagaaagagcaagggaggagagggaagataattatgccgagtctccataaagggggttcaggttgaatgattctatttcaatacatgatgcaccccctttcttgaagagatcttggcattgaaaccccttggataaccatctgctccgtgataggattccctcgctgccaagcactgtgctacatatagcgaattctcaaaaaaggactcgttgacgcttggtctcggtagtgcggctattgaatgcaatgtatggggaatggcctcgccaagggcgatcatggtgatcatgccgacacatgagcgtgcatgaatacagtgtcttggcaccgtcttgattatttacgtgctattgtttgtgccaagcggtcgcgcggtcgcaccgagtgacaataatgcgttgagttagggggttgcagtggcagtgctgtgctattttctctcgggatcgacgggctacaggcttggccgtttgactcgttctggttcgattgagattcgcagcttgagcgtcggaagcctatctatggactgcctattacctgactattgaggtgtctagtacggagtatgctggcatagattttcccatgtacaatgaacatggtacctatatatagttagatgtaaggagcacgatgttatatgtacacttcaccgttgagaataggatacgatcgacactggtgttccttcacctcttctattacgaagtatatgttgtagacatacatacgaagtatccaaaaacctgcgtggataaatatagcaacctctcatagcaccgacgccaccttgccaatatcgcggctcttgtcatggctataagccttcatccctgcgaagccacgtcagatgcgcccgaactcttcaaactcctaggcaccagaatactgacccccgacatttctgacatttcaattccgacgtacaatgaatgtatcgccactgttcaacgcaaatcttctggaagcccccgcccatggacctctagagactagaacgtggttggctctcacgtttgatcatcgggtgcgaaatcgacttgccaatgaccgtttcaactgggaggtacatgggaatcccgtgttccaaaacacggcatcggacaccggagaattgatccttgagcaagtccacagaccgcagaacagagagacgaattttgaacggtcgcatctaggtactttctagcccctaagatgaccatctgacagcccccggtatcatgtctacagctaaatgcgcatgacacggcgatgattattggtacttttctatatctccctatgatatactccgcaggcggcatgatattattttcaatagggcgccgagcttgacaggctgaaacacgtttcgggtatcgcccagcgaagcagcaacatcgaattcagaaccagaaccaaaccaacagcattatccaatataccgcgtacagagtaccgagtacaagcagtgtacatgtacattgtataattgattacaaaagaaacaggtgccaattcgagcagtttcaaccgttgtccatcgcaataaccccaaccacaaagcatccaaccacggaaggatccatcgatgatcaccgaaagagggagaagtgcgcgctatcagcgggagttgttgcgagcgacaacagcccgacctacgtaatcgcgcaagaacctacaatattaccgatccctcattcgctcgatcgccagccaatccccggccgatatgacgccgttttgatctagggcgctttgaaggcgattcgagcgggttcgataatacatgttgccggattaaccggtctgtggatctgccaatgatttgatatcatatcagcgatgcgctgtgatgtaccatgggtttgaaaatgggggcttgagcttctaacctacttccaacgtacaatatacgtttcagatgggtcatttgaccttctgaactggtgacatcacggatggagaagggcatggcacgatggctgaacgcgtggctggttactatggtagggtggcttttatcgtggcgtacactagcgatgcggtactttccgagatggttctccatctctactgtacgtcagtgcttgccctatacgatggacgacgttgggcttctaggatacaacataacgatcatagatggccgtgcgatgagattgtacatgttcattagtaagataatgtgggtttcatttattgttgatcttcggagatctatattgaggcagctatgagatatctcatcaatggaattataagacatgatggtgacgctcttgatgttcaatatctgattaatatgtctagactgctttcttctgattcagtatcctagcatatagtaaatttctctagcaccattcgagtcattatccatatgtcaaacctgctctgtcgatttgatactacacaacacgagtcaccggtttccttcgacctccggataattggattccatgtctgaatggaatttctgtttgaaatgttaatttgcatcagtaccatacagaaatatcttgtcttgcttttgccgctgtcgcttcttgtatcccagccagcagtatttcaccgtccatttaccagtatacggcacaaaataacatattaagacactttcacagaagttagggcatacaaagagatgagtcgggtggaattcagcggatattttttggtagttcgtgacttctatgactcctacctaaggcggaaagtggaccttcttcgatcatcgccgagcctcagactccgttggatattccatcacaagatttaatgtatatatactgacaaaatgattcagtagaaacctgtcgggtaatttggatagattgaatagagaaaatggcggctgaaagataatcccgccacatccaacttccaagcttatcctctgatgcctattcttcccctcaatacgagctgaaatttcttactttcttctatctctaacaactttcaatatttctaagcaatggaatctaacccaacatcctctcgctcatttgccgcttcttatgtatccaactcccgcttccatcgctccttcaccatcgaaccaactcctgctcatggccctctcaatgtgacttacggtgattacggccgcgagcccgatgagaatggaactactccgacacttctctttataccgggcatgttttcatcgcggtacatcggtatttgtctacacgcgattgccgataaatgcggcgtccgcgttttggttgttgatcggtaggtgtaccagcccttttatataacatgaactaaggtcaacttgtatatagtcccggaatggggaattccactgacgtgccgctcgcgcagcgaatgtcaacctggattgagaccgtcccacggcttttggcccatctagacatccagcatgtttcgttggcgtcgcacagtgctggcactatgtatctgttcaacaccctgtatcactgtcgggatatcctatatcccgagaaaccgatggctaccgttctaggtatgttaaatttcctgcagataattctgtcctttttgtatatattgttcatattggacggctatattccaacttcaaaggccgagatctaaccacatgacagcgccatttgttgaccccgccaaatctggcatgacatccttgaaaatagcccaatatatccccgccccagtcttcaagctctggcatcatatcccacgtctctttctcgccaatgatgggtctgcaacagcaacgagtggagaaatgattgccaaattctctgcctcctttccctcaaagagcggtgatgaccaggcaaagaacagtctgtacattgcgcagaactatggactagacatagaccagcagaaggagatagactctttgatgatgcagggtatgttcaaagaggacacggttggcgctaacagtgaggcgctacaatgtctacggaaggagcccaacacgtgggacaaatgtgaagactatgaggtctttgtgcgtgagttggtagagctcgaaagaggacgggaggggccgccactgaaagtccaggcattgtttgctgagtccgacagcatgagcggcaagaagggtcaagcctattttgagagatgctggcatcagatgaatgatggggactcagagggtgcaattgaatttgattcgagggtggtttctggcactgaccatgatagcttggtaccgtctgcggaagtgtgggagagcatcttcaagaaaatgcaacgagcggaagacaatatctaaatatggttcttgatatcattagctctacctgggctgccgtacgttcaggtatacatacatacatcgggggctaacgctccaatcattcattatggagctcatgcaaaggcttcagattgaagctgattgtctgtatcggctgctcacgcaacctctgtccataacgacgtaaaatttgaagaatctacgacccaatgtgatatctagacattatatataggatgtacgtgtttccagatgttcttcttatatatctttccactcgtatacatagacaaaaacaaaaacgtaaaccggacagatgatttttctatgtacaacaagggacaactcgtcacgagctgccgaaggctatcgacaatcctgcgctgatagaatatttagatatctagaaaagcgaggaagatacaccaagacgaaggctgtccagaaatagggccatgtgcagaaaaagttacagggactcgaacctgctatgtcttaggagagcccgagcggtatgattcggctgatcgcaatgactccagagaaaggaagaagaggcggaagatctcatttccattgtccagcatcttccgttccctgggcgacccgtttcgccccgttctcaagacctgaacttgcactaccgagcgcattcccaaccggctcgccagcactccccgtcgcgctgttgatagtatctccgagacctcgcccggcagttcctgtcactccacccactgtgcgggtgataccaccgactgtgtttccaagtgtggaggtgacaaatttggcagctccagtggcgcctttgtcttggttggattcgatcggcatgatgatgtgattgatttatggtagatttgagcgtgcttgcagaaattctggaatttcggaatggatgtaagaggataacaattatagaattatagattgtagtaatatggatcgaaagaaacaggtggcagaaggttgttatattaagcgcgcacgctatgacatcattgggtggcaggggtggcagtataggtttatgacttgtaagaatatcagggaatgagagggaaatgtggcgaggtttttcccaagtgtatgcgctcctgccctcgaaatcatacattatcttatccacatggcaggtacactccaacatgtatatcaacaagaacacgcatatgcgacctaggagaatgacttaggagcagcgtcagctccatcgtcttaaagccatggctggtctttcagtgattcctatcttgagcttagagtccgaaatccatcaataatatcagtctcgcggcctggcaagtgtgcggactggctcagcattctaaacaaatgagagctcatttatcttttcaagtgtgtgaataccgaccttccaaatggttgctttcgaattgtcctggacagattgatcacatcatcaattagttgctcggcgagctcagcgatagccttggtcttttaggcctcttgaggtctatcgcttttagatgcaggttcttgatcctgatgcactagacagaagacggacagcaaaccaatctccaaggtgacagcgattcgaccaaccgaaatagaggacatagaattagctcaacttgagcttaaagggtgaaacaacggatgttcttagaggttaagaggttaagagtactatatatgactgcctctgttggccgaagagagggatctcacgcatacacagaaatggcgagtaggatagtcagacaactgcttctgatgactaaatggaaatgtaattaactagttcaatcgatgtgtttcgagatgttcgatgatcaaaaacaacaaaatcgggaacaaaacgccctgcctgtcaaaacgcggtagggggnnnnnnnnnnnnnnnnnnnnnnnnnnnnnnnnnnnnnnnnnnnnnnnnnnnnnnnnnnnnnnnnnnnnnnnnnnnnnnnnnnnnnnnnnnnnnnnnnnnnnnnnnnnnnnnnnnnnnnnnnnnnnnnnnnnnnnnnnnnnnnnnnnnnnnnnnnnnnnnnnnnnnnnnnnnnnnnnnnnnnnnnnnnnnnnnnnnnnnnnnnnnnggttataatttcagaaataagacaaaggaattgtgaaaaatgtgaaagaaaaggcaaaaagagaaaacaaggccccttcagaggcgccgaatgcctcggcggccagaattatgttggctctggcgaacagacgatctctgactagcacgtttgcgtcgaggtgtttgttcggtccgctccatcagcttcacctgctctgtctgctctcgcagcctgcaggctttgacatcacgccaccatcgagtaatcacctcatatgccaactccatcctgactgtggcgatagcacacgcgcgcttatttcgtcgttctataaatgagcgccattcccgttgaataacgatggcggagaagacatgcttcaaaggcagaggccggggattttcagtaggcggcgaatgttctatttttttgggaactctgacggcattccctcgagtttcactcatattcactcgcttcattggctctatttgcgcttcattgggcttggttgttatgcgtgttctgagagtggcattttgcacagctggacgggccattttgatcaccgttgaatgattttctgatttgctttttttcttggtgatggcggaaaatccaggagggatattttctttgccgccacctgttccaggtttatcaaaggttgtcgcccctgcctggaaaaccttcaagttttgctggagcggagctctccgagtagatcctgtcaacggcttttgtggctggcgtctagtgtgttgtgacttgaaggttttgatcccagcatcccctgagatatgtggaattgtgtctttggtttgccgcttgggtgagctgtaaagatccatgaagacggtgggagtgatagagtcatcagacggaatgtatattgtatcccactgtctcgaagactcgtgtctcgacaggctgtgagttcgaccttcgttaagaaaacctgacccgacatcgaggctttctaacaagaagtaaagtttcatactgagttaagagttgagtcaattcctgtgaaagtgaggagtgtgtcgggattgttgtgcagagaagcggtcaggttaatcaagggatagattccaacgcggggaagatgcggggtgagacttgatgttatcaacaagtttgagcaactgtacagtgaggtatggaatcaataacacagatcgaggatagcctgtctccagggctggaacagtcaattactatgagaccatgttgacctgtggacgggttgtccagggcaacacgtgggggtcaacacgtgacatcatcaaaccgaaggatactaggagtacggatacggagtacacacttccccttgctgtacgttcttacgaatgcagatcgttcaattcggatatgactctagtccgatatatgtacttcttatcacttcgccgaagaggatctaatttcatggcgacgcccaaatcagccttggttgcatgatgtcagactgggatatggctcctctacaacataggccctaaccaagaactgatgtttttgttacggcctagtgacacgccattaaccggccatgcgggatatccgggaacctggcttcgtctcctaagtcctgcatccctttcgggagttagcggtttcctgcaggcgggccgatatagtctagagcgccgtcatcgaccgagtgatctccgatcattcttccgaggatactgcccattgcgccactcttcacggtatgaaggcattggggtcaagatcgacatttaactcgagatctagatcgtctattgatgcatctgtgaatgcctagatggatgaatttgaacatatcgggattctggtcacatgcattggtctaatctactccaatttagcaatggacaaggccattttacagcataaaccacttcttctcttgtcctgcgaccgcaagtccaaccttcccctcatcagctagttttgatagaacctgcgatataaaaggccccgccattgcctccatctcgggtccgtagagacttgcgatgatgtcccgcgtcgtcagcgatgcccttgtctttgtgttggccccgataaaagccgataaaacctttttttctcgcatttcccaatgtctgctccagactatgagtttggctggcaggtcgtcaatcacggcaccatgcccggggtatccaactgttatctcttcattgcgcacaccttgggtcataacttgcaaactcttcatatatggtcctagatcttccacaacaacactgcctccatgcccaagcacattatcacctgtgaacattgcgccgctttcctccaagataaagcacatgtggtcttgactgtgtccgggcgtgaacaaggctcgcagtgtagttccttgcgcagtaaaagtctgtccatcgcgaatcgaatgttggccccggtccggatgggccttgtggaccgccgcgaccagatgtggatactgagccagtagcgccgggagaccaccggtatgatcggtatgccagtgggtcagcagtacctgggagatgctcaactgatgttggtcaagatagttgacaagagtggtgagccagatcggacatccctgtcgacatgacactcgtgtttagtctccaggtactaaactgggagggtcaaaatcactcacctgtcctgtatctatcaaaatccgtttctggccactgccgactagatacgtattggttccttgtagttgcatgttgcctggatttccgccgagtattcgaaccacctctgtgctgagttttgcgacagctgggagatatggcagtccagcgtttcgggcagatagatattcctgccaccctggctgcgtccatactttcggaggggacatgtttcttgttgatcgactctggatgtccaggtagatacctaggctttgcgatttgagtaagtagtgttggaattgaaaggtggggtccattcgtcatgcatggctgcctgatataccaggtttttatccccaggctaggactacccgagtctctaaatattcaagctggatatgtatgtatggcttcaatgaaaatctgacttttacgatccgacaagactttctagtcgataatcatcacagtaccgatccatcgcctccaccttccatgtatcccagttcaagatgctaagtaagacctgacatattgcaactggaaaattgaaaatcaaatttattcgtattgcgagggcgggcaaaagagtcagttcggcaagtatgcggatagtcagcctccttgctagagatttgcaattgctaatatctctcgcgagtttggttctacatattaccgagcaattgcgcttgaattaggaggagcatgatcgtcgttctagaagcatcagggatggtgatctattcccaaaatggatatatacagctggcggattataatcgatgactcatcattgtgtgcataactcactagttacatgtctagaaggctcgcttgcatgcagcatacggctcgacagatggacatcgtacgaaccttgttggtccattgatcagattggctggaaactagccatataagtccacatgtatatcgtacttttatgtaacctctaatctcctttaaattacctcgacacccttacttataaaatcatcgtcgccaggaacaagtaagtgggtcaagtctaaattagactctcgtgaccgggagacctcctttccccggatgtgcctcaacgtggccctaggcattttcaacctttaacatttacattcttttgtgctcggtacttttctctttgcccggcgcctgtcgttttgcgacatggatctcttgtgagcgcctgtcttatcacctgttttgtgtcaccactcgcccacctcctccgctgccctgccaccgcggcatgatcccgcaacatggaatcaatcgtgtatgagaactcgcctttggccgactatttggaaggttcgctacgtccgtgacacgcgaggaatataggtccactgacagccgtgctaggggagggtggaaacgaagaaagttggcccgtggaggagaatcagagcgacgatgatcatacccgttcctccgacttcgcccctcgaggggcttccaaatttcaggatcgcgttagaaacaagctaccgaagcctctcaatctacgaggcacaccgcagggggaactcatcgggaaactatatggctcttgctcagtacgcgaccctccacgattgaacaggttcatactaacacttcttctcgctagtccgccctgaacgtccgactaccacgaagcgataataaacgatttttggaacaatttggctacgtcattgtcgcatcgcaactgttgaacgaacacagcgctccttcctacacttctgctgcagatgtcttatctgcaaaacaaccttcggatcttccgtcgctatctacaacttttggggttcaaggcgccattgtcacagctgccacatcattttctatcgcttggttgctacattggagccgttcgaggactgggtcgggattcagtctcaagaaagttggagtgctattgatacttgtgcccgctgtcggtgtctttttctatgctttcgcaaaacggcaatggttgaaatatctccggcaccaggctgttgaggcagctggcgctttcattggaaacgcccaggggtttgattctgctgcgtcggcttctgtggtttttatccaggaggttgagcttgtgtcaagaggctatcggatgtgagaacgtgattctttttgtccaagataagaacaggctaacgaattatcacagaagcactcctctaccgcccatcagtcggctggaagatctagtacaaacgcgacgatgcttgagattgcgccgagcggtttccgaatgcttctactccatgctcgagcgatatattcaatcccaaaacaccttacgcccacttaccgatgagggcgatcttgcgaagtattacgacatttatgacattggactggaagaactcgaagcggttgaggcgtccctgtcgcagcgaactaacgaagaccagtattcattgcgctctctaagggatctatttggaaaactgtacagtgtgagaaaaagcgttctgtgctgcttgctagcccttagcgccgatgggggtggctccgatattacacggtggagttcagctgtcgaggaaatgcgtgagctagctgcggccaccggcaacagcatgctgaaaatgacagcaatcttaaatgaggaggaccgtaagtattaatctgtgttgtatgacacggacgctagctaatattcgcaggtgatatcattcctccatctccattaccttccgcctcaccaagcaaggatcacctgcgtgctcaatttcgacggctcacctctttgtcacaaggggtccgtgccttgcatgctaaaatgcacattgccagcgaggagtcacatgccaatctagaacgcgcagatcctgagttcgaagcaaccctcctctcacaatatgattcggttggaaatgatcttagggctcttcttcacgaatgggaaactggtaaagccgcattggcaaaccaacacgatcgccttagtgccggggatcgctcgcgaccgccaagtactttcttacccatgtcccctacacccagtctgggaggatccacggcagttgagggcagcccaacggatgcactgaaagccttaactggcgaggcccggccggatctgacccagacctatgatgacgaggaaattttcgaagctgttgtattaccggcctcgagaaacaaaagaatgtctttgtcaagagacgagcgtcttgcacgtgtacgagaagaccgtgccagacaggcgattgccagagaaaaggtagatgccagtactaacatgctcaaggaattggaaatggtcatcaagcagcgaccaggaaacaactctgcaaaacgagtcaccagcatctaagacatgcttgatgcattccatataacctctttttttttgtccacgccatccagcacagatttgacttcgaccagcgctagcagcagtgaagtcacaaattgatacccacaacatgtacatatagacggggctcggcgacagcggtgtttattcgaggactattgcttcttgcttctttcttttgtgccattattatctgtttgactgtctttaagtggtcttggatcgcgatcctttcggcattcatctccattgagtgtggcgatcaacgttaattatttgctaatttgtacattacagctggctcttttacgaatgaattatccttccaatatcctaccactgttcattgtgataaaaaaccctagatgtatatgaaggaggccttattgccttattgcctgaggtatcaaacttaacccgaaacggacatatcgccaaacgcgaccgcgtcttccccacccccgaacgcgatccttatattagaccgctgcctctttcatcttcgttcaaatacatacccagttcattattctcgtctccccactactctcttcactaagaagccacactctttcctcttctatttccctacgactcagttaaaaaaaatccccacacaaaacgatcaagagtaagtcggccaactctcaaatcgaaaagattgttgtgtgcgaagaaccgaccaactaacccactccctagtgttggaagcacgattggaacaggcaagccttctgaagcgcgtatgtgatctataccactcaaccaattcagcaatgaacaattactaacactgttgtgtataggtcgtcgacgccattaaggatcttgtccaggactgcaacttcgattgcaatgactccggaatcgccctccaggccatggacaactcgcacgttgctctagtttccatgctactccgtgccgagggcttctctccctaccgctgcgatcgtaacatcgccctcggtatcaacttgctctccctgaccaaggtcctccgcgccgcccagaatgaagacatcctgaccctcaaggctgaggactcgcccgattccgtcaacttgatgttcgagagtccagacacagaccgactgaccgagtatgacatcaaactcatggatattgaccaggagcatctggccatccctgagactgagtactccgccagcgtggagatgccttctgctgagttccagcgcatctgcagagatctcaacgcgatgtccgagtcaggtaagtaaattttcccccgaggcatactcaaacccggtttgcagacacacagatcctctcgtgctaatttcttgcgtagtcgtgatcgaggccagcaaggagggtgtcaagttctcctgccagggtgatatcggtaatggatccgtcaccatccgccaacacaccaacgtcgacaagccagagcagaacgtcgtcattaacctctccgaacccgtcgccctgaccttctccctcaagtacctcgtcaacttctgcaaggcttccaacctgtcttcatctgtcgtgctgcacctctctgatgaagtgcctctgcttgtggagtacggtctgggaagtggccacctgcgattctacctcgctcctaaggtaagttcttgattgttccaaggtcgacatcatggaaaccgagctaatgtgggggtttaacacagatcggcgacgaagactaaacgaatcatccagtggttcgaggggatatgggcaatgttaaaaatgaagctcgatgataatggagagaacttggaggaaaatgttctttcatacatccctgacgacaaggggttttacaagatgttcacgataatttacacattcagcggtcgaggtttcgatctcgcaaatttttccaaacacgcatctttcacctagaatttcaaagatttctaacttcgctacaagtacggattaaaagatgatatcttagatatttcaccgaccattaggccagcggaaagatgtattttattgtgtccataattccgaagaaagccccgacaaacccaaagccaaacccagcgaccgaaacctaacgagcccgcaggcaaaggaccctaaggaacctcgcaaggatggtccacaaccccactaatcagcaaggtcgccaaattaaaacgcttctcagacacccccaacaaaaaaaagaggaggggaagcaagaactgacctgaaaaaaaaaagtgaagcgccatccccaccagaatgatcggaatcgaatgataccatccgcccctccgaagagaagacagaacaaggtatgctgcgtattgcactaaagtgtcatcacacacaatctccgcaccgactctcccaagggcttaggggcaagccccatccgcccgatgtttctgatgtcaagtgcaagtgtgggtaagaagtgatctaggatcacaccaggccctcacgggcaggaccggcgccgacgcgcgaaaacgaacgacggcgcgggtcggggtttgaagattcctccgaatttctcatttgcaaggggtctcgcggctctgggcaggacccagtgctgcgaggacgggctgtgaagctcgccgtgtgtagcaaagaaacgcagcattggtggggatggcgcttgaggaagggaaatttggcgtggagaacggtttgcgggttttatatcgctgtcacgtgggatgagtcatctgtgcgcttgtcccgtttgggaaggtatagggcatccagtgttgtgagttgggttagttgcgctacgaggtttggatggagtgcttcttttaacatcaagttgaatgcaatgattctaattagctgattctcagcaatttgtggctaagtctagagtacactctcggtttaggtcgaacgatctgctgcttgtgctagatttcctcgaaagctcgaacgatatatgtctttccttgaacttctactttctcccccggtgttctccaagatcccaccccctctccatcaaatccgaccaccatcgaaggcaaagagcccgcagcttcgccaaccaaatacttctcattccacccggattcccattcttcccttctggcactaacatcagcgccagacttcttcacaaccagatcaccagatggagtcttctgtcgcgagtgaatctgcgtctggcttagtgccaaatacgtgccccagatgcgaccgataaaagtcttgctaacagtcacctctccttctccactgccgagatctccatcatccgactccagcacccacgaaatacctttattaggtccttctgggccctctctgaacggcaactcccgccatacctcctcatattccttgtcgggtgcgccaggaagatcatgacgaggcatagacccgacctcgagatcatcaccgttcggcaaggggaaaaagctcccacaatcagcaatttcaaacgcattgtgagagtcaagctcatgggagaaagtcacccgcactattgagttggttaaaaagtagttcatattcgtttcgctgaatgcaatggcatcctttggataagggacttacacggctcctgaccctccacgatcctctgcccagcaatcgcccagtctattttgcctgttgccgtttcgatccgcagatcaacgtaccagtccttcacggacatcacaattgtatcggttgtttcctcggccggtgttgtgagccatcggaacgagattcgcttggagaagcgacaggtggactggttaggtttgttgaccatattgttggctttcgctggatgttggattgttatggtaggaattgcctgtttctgtggctatattagatggtaggcgggagctctgctaaacgagatgtctagataggtatgtgacaagagccagattgggaaggttgaagagaatgcccagccatttggttatcttcccctcacaccccgcattcccctccagggacattctcctcacggacattgccgttaattatgatcggttatcaaattggaagattgggaaattgatatcaaaatttgatggttttacattgaattctgggtccatggcaatctttcaatacacaaaaactgggtctcatgtcactctatagctgtaaagaccagcttgcagctctgccccttgggcctcgaagagatgatctgatcatccagcttcatagaagcagtcatatccgaggccaccgtcgtccgataacgagaatacacttcccgaagcagtgtcttcatctcaacaagcgcaagactaaccagtatcagccatcagcaccagccaaccagggcacaaggaagacaactcactttttccccgtacaccctctcccacctgtagcaaacgaaaagaatagcctattcctctcagcagccccctcttcaacaagccaccgatcaggattgaaacgatcaggctcagggaagacactctcattcgtccgatgcaccgaataaggctggcaactaacgatagtatgctctggaacgaagaacccgtcgatctcccttccaccagcaggtacatagcgaggcagtgacatcggaataggcggcgcacaccgcagcgcctctttaatgacagcatcgagatacacatagctatccaagggtgcattgacaggcgcagcggtaagctctttgtaaaggttgtgttggaaatagagattgtgaggttgtgagagctcccacattaagaaacacaggccatcccccgttgtgtcgatgccggccgccatgtggtctttgcattctgcggcggcttgcattagttccaggttagattctttgcgcttgagtttttccattaaggagtagtcgtcgagctcgatttgggcggccatgtctatgacatattggtttgcttttggggcgctgcgggcatggaggaactttgggaaataaggtgataataaagggagatagtactctaggaggttttctgtttgccgttttagtatttatcaccagaacatggaaatcgggcagtgcatactttggagactttgatgataggtcagttcgtgcatgatctcgaagtcttcggctacattgagagatctcaggccgccggggctgaacatgaaatgcgtaacgcagtccagggcatagcagtgaagcaaagactggaagggttagcatttctcatgttggatgctttaatataatgacaacccacgtaaacatccacactcttttggccaccctcgacacacttagatacaaacgtcatggcccgttcgtggataagagccatgggtttttctttcatgatattggtcatggcgtatctatcggcaaagatgcgttttcttttgctgtgctggtgtatattagcactcgaatgttttatttctattagaaatatgtacctcgtccttcaataaagtagaaaacattgtcctaagtctttgtattagtggctgccagctatttctccggtgcaaaggcttacttgatcttgaactgcctgaaaagatcatagtactcggtcttgtcatacccactcccccccgaagcatagatctctttaatcgcatccaggctggtaaacgatagttcattgggactcagccggacgacaggaccatagatcttgtgcaagcggtgaattgactctcgtcgattggcagtgaactcctgatacttaagccacaaacttgtaaatcgagtataccacggacccggaattgtagacaggggcgagaagaatccgcgtatgactatatacccacaaaggatgatagccccggcccacagagacagcatgttgtcgtatcagagagctcctgggtgatgaaaagtttctcttgaagaaggccgaatgtgcaatcctacgcttatttataccatagatctgattgaagcatcaataattcccattagataatagacataactttggagatttgatagtctttgcttcaacagttaggatttgccgatatcatcgttatcggagtgcggggaaatgcgaacagacttgggtttgggttgcgataagatttcagactttaaaccaaaaagggaaatctgaggagatggtaggatttgaaaaaaagaaaggttattcccaatgaatgtcacttgatagttatattgtagctaaacagccttgtcccgatcttgactgggattcatctctagaacgtatggcaggggagataaactgtttatacggcagacgggggaagatgaatgcaaaagattatgccgtagccgatcacttaagacattggatatctctaactgcattcaaagattcactggacagcccatatgtcaccaagcaacctctcaaacacaagtttatggctgcagccgaagccaagatcaaattcacaaaacagtttgaaccaatttcatgctgatggttgaaagctacatatacaatgatattattatatggagtagtaatcaatcaacggtgcattaagttacaataatagcctagtgatgggggtaagggtgaactatgacatcacatagattccctttacttgaataccataaatagaactagacttgtgccagtgcctcgttgactatcaacaacaacatagtcgagagctggatcttctatagtggagagcttcctaaatttggtgtcgcagtattgagagagctagtatcgattttatcattcattacaaacgggctgcagtcctaaaaagacaccaccaggttaacgagttggatatgctcgatcatgagcatataatctttgaaatatgagacctcaaaagtaaaaggtcaagacctgcattccatttcattgttgggcttgtctttgccgagataccctgctccggcggcctttccgttgatcggatccgacgctagatgaccgatccaatgtctcacttctaagggttcttagtgggctgaatgggggttttctagatgttgccgatactccaccaggttagaaacacgtccatggattttgtcaggcaattctggagatgtattggagaagactatggttatcggggtggattcgcataaatgcttcgattggcgatgtgttggcgttgatcaacacatggtttatgtatcgtactctacacaaattccttggtctgaatctgggtatttcgaacaatgatggagcctttagccggctgtacctaatcggaagaaagtggaccttctcgacgtaaggaatcattcgcacatcatggccgatcccggtgcatagtgctttagagatcctgcgaaagcacctaggttccgaagttctaggccgcggagagtgaaagtgaggaccaaaatagagccatggaaatgaaagtaagatcaaacagggatgatgtaattatatttcagtaccgaggtacagctgtacacacgcacccgcatgaaccaaggatgacttggtcaggggccatggttcagacaatctttaaactgcctcagccacttttgtatcagccacattagtgagatcgtattccagctctcatatgttattacaacatacagcatgcttcacagccttacctccacattattttctgcggataggactcattgtggcttagactaactaattgacaggccggtgtcacaggttaaattggcctgagatcagggtcttacccgtggactccagccctgggctactagcacgattaagtaagccaaatagaacacctgcctagtgggcccggcgggcatccgcccgggcgtcgtcgatagcctaaggcgttgaaacagtcgaataaaggattctctctttaccaattagacgacccaactagaagagtacaatatatgtaagacacacaaaagcaaaagaagaaaaaaaaacaaaagagaatcctaccaagtacggagtaaaataaaaaaagtctggactcgactaagtttggtacctgtcgcatgtcgatggggctactccactgccgattcaggagaaaaaaggcgttggaatgcagaaatagtgtggtggctttgtccgggttggagaaacagcttttcagggactctacggtgcatctagaatgtttgtagtaagcagagtcccgacttgtggttattccgtacatagtgtacttcgtacactccgtaggagcctgcatactgcgtatgtgtgacccgccccatggtatgtggacaactttggttgaaccccagatgtgcccctactttctctcccgtctcgaatccggccttttttccttcttcaccttttcttttttgtcactcgttcgatatttcctccctttttatttcaagggttgaatcagctgtacggtcgctgccacaacgcattccctcgattccccgcctcacaattcggaactctgcgggataaaaaaaaaacacaaactacaacatacggaataatacctagagaaatcaccgtctatctttaattcgactcaactggtttgagctgtctgcttgacagtcggatgcccctgtcgaggctttcctgcgtctaatcacacgtctcctgacgaatcctggcttgggccaaccaaattgccaagccacagaagcacacgagcctccgttgtgttttaatttgcccttcccccccgtgtcgggcctatttcccaccggtcttataaagcgaacgccaccgtcaggtggttacaccgtcgccgtgtctttcactaaccatcccgccgacctgagctccacgacggagcctctcggcaagattccttcacacgggtcgcgcgcctctctcctgggggggtcttttgatcctgcctttcgacgaggtcagggagggttccgcgcacgagagggatactctaatgtcactcctgtgacccatagccccaggatgtatctcccaaatacatattggacatggtcctttgcgatcgtcacattcgtccaaacaatcgtgacactcagccttgaaaggtatgaaactccaccgatgcgaacatgggaaatcaacattaacgtcgccattctttctagttacatcttcgcgaattttcaattgcaagaactcccaaacaacagccccgcctcgaaaaccatccctactttcctcgccctctatggcttcggtttcctctacgaacttgtgctggtatacgatgctctgcggatgaagaatacaattcaggtcatcggactgtgtatctgcaatgttggtctcctgatttacggcgctgttcaagtgaagcaaattcgagaggccgtctccaccttggccttgatgaatatgatcagtccggttgtctgggcccagtcggagccgttcctgatcatcattccgtgcatcgtggcattagggacattactgatcactttcgtcgcttataagctgtacgacgagtttgcatggacaatctacaagcatatcagtgctgatctgcaaatgaagcgtcgctatctcacctaccaggtttgtgttccattcgacttccccatcagcaacacagctaaccggtcactaatcagatctatatcgctctcttgaaattcgatttcttcttcttcctgggctttactgtccagttcctcgtcttggtctcctcgactagcatggacgttgaatttgcgcttacggtggctgccatccccgtgaccattatcattctggtctgtggcgcctggtttgtgcgacgagaaaccatgactggcatgatcatcatcattgtaagtcgaataccagcaacgttgattcaccttctaacagtcttatccagctcctcttattcgccgcgatggggtatttctgcttcaagctattccgaatgtactccccgcagacttacttcaaatacctgcccgctcgaccatcgatgaccttcttcgccgtcatcaccttatttttgattgtgatcactatcgtcaacgcctgcatgtgcgtccacaacttcaaccgcggtttgaagccccacatcaacaagaagaagaacaaggaagcagaaaagacaaccgagctctcttcgaatcttacccaaataccatcacggatgatgatcgactgatcacccggttcgcaaaagggtgctctataagtaattttctggggcgttgaattttggagcgtcctgtctttttttaatctgcgaacttcgtgtccgtgtggacaccttgaatttagcctgatctctttgtgcatttttctttctttttcctgggctttcggctcagcatgatacctcatttccgtcgaatctgctctgtccaccatctcccattcttcctgactctgagctgtcaaaaatttcctgtcattctattttccttggttccctttacatgttcatatccataccccataccccatacccctgcacgagtgcaccgacggcgttatctgaatgatttgattcccggaggtgtcctccatgtcttacgacagccatcgatgctttttccgatgaatgtgaattagtctttctcattagttcaatggacttaaagcacgtgaatggtattttagtagctatatcgatagaattgaactttctacctccgtgtcatacatactttgtacataacatagactgaggtcagttgttcactcgttaaagaaggtgctagttaccccgtacatattgtagcaatatgcgccgagttattctgattggtggatatttttgtactgtaaatactggtaattatcacctaattcgcttccaactgccggggttgacatgtcaaatacggtattaccccgaaaaccgcgatcgtggcctcaactccgcaaacctcctttcagaccatctcaggctcctccttccctttcttcttgaactgcatttccatctctcttttaatctctttttcttttcctttacactcttctacacgcaattaatcacaatggtaagttcatctccccggacccgaaccccatcaaccacccatccgacgatcaagccagcttgccccatccaccgccaacccattgcgagccctcttgcgaatttctcaatcccacaattaacataatgcaccactaggcctccccccgcccagcgtctcccctcacctcaggcgccgagtccggccctgactcaaagtcaggtgccgccgcagccactggcaactccgtcggccgtccttcctctccctctactcccggcggtcctcgtgctgccatgcgccgccgtgccaccgctgaccataaggagaccctgcgcaatgcccgtcccagctccactcgctctgctggcgccggtggctcgtccggcaccatgctcaagttgtacaccgacgagagccccggtctgcgcgttgaccccgttgttgtcctggttctgagtctaggattcattttctcggttgttggtctgcacggtaaggaatcaccactgatgatgtgaatgtttggggtcattgtttgattggttgctgatcgttttcttctctctagtcatcgccaagatcacccgcaagttctccgcttaagcacttgatcagcctcaattgcgcagttgacatcccgttggattttcgcgtacggtctatctatctatctcgggcgttgactgcgcgctccccgacctcgaatcctcctcatcttaccgcctcatttcccgactcctataccccgtgacccttgggccatttctcgttgtggcgctggaaccaaatcaacccttccgaaacaactggcgtgattccgttttgttttcattttgatgtgtatgtggtgttttcatttgcgttgaaaaagagagttactcaacgacctatctgctgtataggtcattctagatagaaccggcctgttcgtgtctccgtcttgactttctattttacggccattggctcgtttcctagcgatatcaagcgctggaatatgccgtggatgtgctagttcggaccgaaacatggtggtatttgttctatccggacgcttgtctgtacaatataaagaattgattgaatctgttcctagaattagacctgattttctagtggctgaacatgcatataaaccaccaactcttgcttcacgtcattccggtgtcacaaaaattgcagaacccgcaaacccgtcattttggaactcgtctagagcttctagttgttttctgtagacccaaatgccttcgtttcataccaagggatcccaataagcttctctcgaccgatcaattgcttcattgctattgactgtgtagttgataatgcacttgacaattcgttcatccagatcatccagatagcgacgccgacaaacagcttcgcagactttgcaatgtttagcataacgtgcatatgacttggaattggaggtatcacacgcaccggacatcgcatagtatagaactattatgggatttcaaacacctcccaggatcaggccaacatcccctataaacctattggtaatcatgcataatcctaggagagctgctctatagaatgaagaaaggcagcggccttaggggacatggtgaaaccatcagcagcttactgcaccagaggcaactcctcgccacaattcgattcgttttcagtggagccacatcgaagttggtctctgaacgccgggattgacccgttccacctcaggttttacatctgcttaacttgatgacaatgaaagggtagcgacatgaatgtaaggacaaaagtcatgaatatatatagctgagcggaggcaaggacgaacttttattctggggaacattagggttttataggaatggctaacaaaggaatgcgaacggaccaggcaatcatggagcctataatctatggatttcaataacctggactgcagtcattgtacaaccctctccatcgcctttctatcactatacccccttccccttcaatatggcgtccatccatctaggatatagcagcgggttgtagttggactatagctctcgggaaaaaaggtcaagaggaacctcaaaatccatagtgtctgcaagaatcggagctctagaccatgccacaatcacccaaagccagttcccagacgatttagatttgtttaagagttgataacaaccttatctcttaggggtcaatgcatatcaggtggggtaccttggggtctcgaattaagctacgattgaatatggtcaccttgtactctttttcgctggtcaaagattagatgtaggttgtactatagagcagatatgtatatatcctccttttacacctgatttcatcgaatacaaattgtattcctgatggcaccatagttatatactttgtaccaggtcctgaagctcgtgaaacagaaaaaagatatgtatatcttcaaacttcaaacttcaagattcaacgattagataaataaacaagcatttaacaggtctttgacttggtggcacaatctaggcaggacttgaggataagcagtctatacccccgaagtcgggagtatgatatactatgatgaatatgataacggacttgattcacgcttcaagaaaagtttgattgagagcaactaatcgaggcaatataatgttgacagaatttaaagtgaacgtgggggagatagtggatcatatacggagtaataaagtaataagaatgagtaaccttggaacctttcactgccaagcatccttggagccccgggataccccgatatcccctaaacatctgcgatccgtttacatcggcagttggcactggtaaatgtcaaacgtcgcgtcgaacagcgcgagtttgccgactcgtaaactcttatcttacatgttctccagccaatcacagccacccagccatatgtacccttgacggtaactgataacagtcagcgccaaccaatgaccgacgacatgtataccctggtcaaaaccttcatgcttcacatcagagtgactctttgaaatccccgcgcgagtgctccattgtgatgttgatcccctaactctagtggcgtacttagacggtccatatccctactatgcgcgccatggtattacgagagcatgttgtccttatctggcaatcagaatggagcatccctatctaagcttagggtcagggatcgtcatgctatactcccgtaccccagtgcgaattcggagctgggggtccataccatgcttctgatgctatgtgcccggacctatatgaggttgctatcctcccggtctgggaagcttgatatcccatctgccaagtcagggttggaaagttatacaaggcgtactttccatattaactggagcattagtcgctgactcccaattcaaggcaccttgccatctttcatatttctgttgtcataaaccctcttgatattcacgtctacgacatgtcgtccgacggggttattttcacagcgcctttgtctcagagctttggatatggaattatcttaggcctaggctttgcctttgccctactgatgatcttcattacttgggccttgaaacggtgcgtctctatgccttcatcgatatcacccacataagctgacaaaatgcatccatacagctatcagaatgaagtccaaacatccgagatgttctcaactgcaggccggtccgtcaaatcaggactggttgcagccgccgttgttagtagttggacatgggctgcaactcttctccagtcatctgcagtcgcatacaaatacggtgtctctggtccatttttctacgcatcaggttagttccggcggtatgcgaatgatctgaaaagctctatatctaacagtatgtgtataggcgccactgtccagattctcctattcgcaacactagctatcgagctgaaacgccgtgcgccgaacgcgcacactttcttggaagtcatccacgctcgctatggaaccgtcgtgcacgtagttttcatagttttctgcttgatgaccaacattctggttactgcgatgctgctcaccggtggctcggccgtgatgacatccttgactggagtgcccactgcggcagcctgcttcctgctcccaattggcgtggtactatacaccctcttcggtggtattaaggctacttttatcacagattacttacacaccgtggtaatcctggtcgtcatcttcctcttcgccttctccgcttatgccacaaatgccgagctaggatctccatcaaaggtgtatgacgcgctagttgcagcctcccagcgtcaccctgttgagggtaatgcggaaggcagctatctgactatgcgctctaaggagggtggcgtcttctgggtcatcaacatcgttggaaactttggcacggtcttcttagacaacggctactataacaaggctatcgccgccagtcccgtccatgcattcccaggatacgtcattggcggcatctgctggttcgcaattccctggctatgcgcaagcacgatgggcctctccgcactggcactagagggcacgcagcgcatgagctccagcgacgtgagcgccgggctagtgctcccctttgcagcagtcaagctgctcggctatagcggtgccgtcgccacaacattgatgatcttcatggccgtgacatctgcgttctcagcgcagctgattgccgtctcttcgatcttcacctacgatatctacgcggcctacatcaacccaagcgccaagggcaagagacttgtctggatctcgcacatgtcctgcattgtgtactcaatcatcatggcgggctttgcgacgggtctctactacgccggaatcggcatgggatacctctacctgctgatgggcgtgatcatctcctccgctgtcttcccaggagccatgacccttctttggaagggccagaaccgaatcgcagcagccctatcaccgcccctcggtctggcagtttctctcattgcctggctagtgaccgcaaagaagcaattcggaaccctaaccgtcgatagcactggctccaagtaagcattcctttctcaacatccatactgcaaacccaaacctaacaaaccgccacagttaccccatgctagccggcaatgtcgccgcccttctcagcccactagtcttcgtcccagtcttcacctacatcttcggcccacaaaactatgactacgaatccatgcgcgctatccgcaaagtcgacgacacagaagtcgccgccgccgctcatgtcgacctcgaactagttcccggcgagatgggccccacgcaagatgagagcgaagaagaaacacgcctgctcaaccgctcggcattctacgcgcgcacgctgacagtctttatggcacttgcattcctgatcctctggccgatcccgatgtatgggtcttcgtatgtgttcagcaagaagttctttacgggatgggtggttgttggaattatttggttgttctgtaccctgtttggtgttgtggtgttcccgttatacgagggtcgcgcgagtattgtacgtgtagtgcggatgatgtcgcttgatctggtggggaagaagcccaaggtttatcgaggaacgaagggcggtgccgatgatgtggctacgccttctgggctggcgacgccgacggatacgcttggagaaaaggataagcagaccttggagagggaggtttgaggcttttcctggtgctatctttactggttcttttctctgtgcctttatcttggcttaatatcttgtttacggctatttataccctcctactactgaatctcaatttcaacttcatgtgctttattattatgtgctccaatcatggtagcaagtgagcattttataacaaccttctatattcttatgaggaatagaacatgctacgccgatcgaatgggcagttcaaaattcaatagcaaaaaaaccaaaaaaaaaatacagttacccaacgccaagggtaaacccacgatattaagccggaatatgtgtctcctgataagcccttcttctgcctcacaatcccgcaataattgctgcatccttatgcctagtagaatttgaacattggaaactcatttgtatccaagtccaccctgtgcttgaggtggaggctgcagagggggctgttgctgccagcctccctggacctggggaggcggctgaatgccgtattgcatgcctggcggaggtcgcgtgtcaggcgtgatatcgggccggtcactgatgtaatcgctattagtataactatcatttgaatatatttgggcaatgcttaccgtaggtcttgggtgtaacggcatgtgtgacattggacctcctatatagtacgttaacgatagagtcaaaaggtgattgatacaggcatatttaccttgtacttgtgcgtagcaaggggaatcactggctgtagcgaggtaaaggttagatatcttgagctgttcgtcaagacaatattctggcgattcataacttacaatgaagcagacggtgaaaaacggccttgaagaattattagtcaagttcaaattattctggtcaggtcctatgggccagaaacataccatcgggtgatgcagtaaccattccaatgttggcctagaagcggagaatcaataacagggccgatagaccactgacgtcagaacttacagttgtagcagtatgcacgaacattctcatagccctcgagctgagacgagaactctgtattcgtggtcagtatctttattcaatacgactgagcaacgtcgacagcacggatacccgtcagggacagggtccactctggtttctggatcgtggggtaggaagacttaccatgtgttccaaacgtgatacagaaagccatggtaattgtgagatatggagaagttggcacacaacgaccgaagagaatcaacagagagttgagaggctacttgcgattgaaagtcgattagagacgaaggcagcggcattgggggtgtggcgctgtggcttggcgggcttggcaggtaacacgtgatgtcagatgtagtggtgcatgattggccaagtgcccctgtataaaaggcacatgtgattattgattccagcagggacccgttgactatcagtgattatacatgtacatatgtacattttagtaaattgtctgaagagtctgcagtttttacctaggacctaacctcgagcaatactttcttttggtgttttacgtgttttgggcagatgcgcttaattcactaatggctattcaccataggataacagccccataaaccaaatattagacaaaagagtcgcttgaaaacacatttctccggatatcacctccccatcggtgtagaatgccgagcctagacacatcaatcacatttattgggtcttgaagagcagaattgcgcagtgtccgaggtagaagtagatgaagtgcttagtctctgttgaacacatgattagtatctgattatcagcataatggttctagtatccacaaaccatgggtaacgaagcttccaaagttacgaccaacaacgcagtgccaggtggcgcccttgcgggagtcgaactaatgtatggggttagagatattatcaggcggggtagaatcggggtagaatcggcgtacctctttcttgatatactgggcaatatcctgtaactggttattatctaattcatattggggatgggatttgaggagtgcgtgtaccttttcaactctgaacttctccatggcctcaatggctggggggtaggttagctttgtttatctagggcgctctcgaagtttcataccgagggcaatagcctcctgctgcatatcctcggtctaaaaattgtgtcagaatcaattggctatcgtagtttcgcatgagtgtccttaccatgtccacagacttaatctgcgctgcacggagcgtttagcacttgtcactggactcacgaaggataaacttaccctccataggctccttcttttcagctgggggaagtgccattgtgagtgattcctgtatcaaaaaaacttcgaagggggggtttaggtggtgcgccaaaaaagagacttggtagcgtaatctcgcgataacgtacgttattgccggtggacaagccacaccgcctgcccgccagaccgcccgcggcactatgaaagaagaaaaaaagtttttctcgtagaaacttcgagtcttcacactactcaccacaaaaacccaaaatggagagcactagagtgttcgtgggtggtctcccaccgacatgctctaatgatcagctaaagaaacattttgcaactcgctttcaagtcaccgatgctcatgtcctacctaaacgtaggatggggttcgtcggcttcaaaagccatgaagcagccctgcaagctgtgaagcacttcaacaagacatacatgaagatgtcgaagatcgctgtagacatcgctcgtccggtatgtcgattctcagctctttttgcttcagccaccctactttcgcctgtgcacgctgaccaattaaggtggtcttgagactgacccgtattattgcagattgactcaaatgacgctgaggatgcccaccccacacgacgacgtgatgccacgaatgataatgatgcatcgttggataacaacctcaagcgcaagagggacggcgagaacaaatcacaggaccctaagctacaagagtacctctctctgatgggatcatcatcgaagactcggacatgggccaacgatgatgatatgatcaagccgtcagtggacacggttcccgttattaaccaacccgcgcaggaagaagagcagattcaggacctgccttcacacccaaaaaaggcaaagacagaaaaaccttccacggtagcaacgcctgagcagcctgagcccatggtaattgacaagattgaagaacaggaggctcaagaaacaccagaacaggacaactctgcggagcctgaagaggagactagacctgtatctgatgcagattggctacggtcaaagacgagtcgtttgttgggccttctcgatgaggaagaacaagatgagtttgatcaacacaaggccgccgcaccgactactgcgccgatcaaagctcattcaccaccttcctcgtctggcgatgagtcgcctcagcgtgacgaagaatcgcgcactgcggccattgagaaaattgcgcccaacacgactgacgttgacagcatcaccgaggcaacgccggaagatccgaatatcgatcttattcggaaatcggcccgtttattcctccggaatcttgcctatgacaccacggaatctgatctacaaccgatttttgaacgctttggaaagattgaggaggttagtacttacctttttttgctttctcaaccctgccccgcctttcccccagtgcggcagactggctcacagcctgtttgttacgagtgctcgtatgatgattttcccgatagggacatccgatgcaaattgcaaatgatgttaccaggacaagatattttagtagatgcttcttgactatctgaaagagccaactcaacccacttttccacatttacacattatattcaatgaccttgagtactaattgaatatagattcacgttgcttttgacacacgctccacaactagtaaaggctttgcttatgtgcaatactcgcatgctgatgcggccattgaggcctaccagacccttgatggcaagcatttccagggtcgtctgctccacatcttgcctgcttctgcgaaaaagacctacaagattgacgaatacgaattgtcaaagcttcctctgaagaagcagagggagatcaagcgaaaacaaaacgcctctggatcgtcatttagttggaactccctatacatgaatgtgagtttacctcttaccaccaccaatcaaaaggttgagactaatttcgctacaggccgatgctgtgatgtcatcagtggcctcaaggctcggagtctccaaatctgaactgcttgatcccacttcttcagaagccgccgtcaagcaagcacatgctgaaacgcatgtgattcaagaaactaaagcctactttgcttcgaatggagtaaatattgatgctttcaagcagcgcgaacgtgggaacacggctattttggtcaagaacttctcatatggtgtcacgtcggcagagctcaggagtctgttcgatccatatggcaagattatccgactcttgatgccgccaagtggcactattgctatcgtgcaatttgcgcagcctgacgaggcccagaaggctttcaagggcatggcataccgcaagataggtgattctatcttgttcctggagaaagcaccgaagaatttgtttgatggttcagcagctccacccacacttgctccagagactcggggcaaggatcaaggtttctcaactgcagacacatttgccgcagatgaacctgatgacagcgtagcaactacgacactcttcgtaaaaaacctgaatttctcgaccacaaatgagaagttcctggaagtgtttcgatctctggatggctttatcactggtcgcatcaagaccaaacctgatcccaagcgaccagggcagaccctcagcatgggattcggctttgcggatttcaaaaccaagggtcaagcccaggctgctctttcagctatgaacggctacaagttggatcagcacgagcttctcatccgcgcatcccataaaggcaaggatgccgccgaggagcggaggcgcgaagataccgcgaagaaggttgcagcgcggagaaccaaaatcatcatcaagaacttgccgttccaggccacgaagaaggacatcagatctctcttcggggcatatggacaacttcggtctgtgcgtgttccccagaagttcgatcatactgctcgtggtttcggttttgcagactttgtaagcgctcgcgaagcagaaaatgccatggacgcgttgaaaaacacgcatctcctggggagacgattggttttggagttcgtgaacgaggaggccgtcgatcccgaggaggagctcgcgcgcctagagaagaaggtaggagagcagatggacagggtcaaacttcaacagcttactactggcgccgggcgcaagaaatttactgtaggagggcaggaggaagagtgaagccttcgttccttctccctttgacaaggacacggccatggattggctcgttgacatcccttgcagggaaaaaaggtggattaatgtcccatgtacgattacttgcatactaccatagctacaatgtggaaataaaaagataccccgaatactgttgaacacgttctttgcagctgtcaatttccctgcagtcccgtcctcgtgcgtctcgtgccctcttgatccaggcgtaaccgtaaccctactttaccttactgtgcaacacctttcttttctaccccacaacttcagctaaaccgccttggatcgcagggtcattttacctagcttagcttactcttttgatggtacgcaggactatcatcaacagagatcagccaagcctgcattccggtggtgatgtctggcggtggtcgagcattccacgtcccgtgccagaagacaatgtagttggaccatcaacattcctgcaacgccatgattgccactgattattgcgatcttttgttgatgcaggtccgagcgatggatgttcaaggtcacttcgcgctgcacaaaatctccgacccactcatcactggttcgtgctgctgagcatcccttgcatcctagacaacttccttcatatcgagccctgtcttgactcctgatttgctgcggcagggtcggcttgccgtcgtcctttggttctctgctctccacacagcgcgcgcaggccaggatcgggacctgcccaggagtatggacaaggcgttcgagggacgtaggccaggcaaagaagacctggcggaacaatgtcgctactggggctacagtacccctctccaaaggggagtaatggttccatataaacaccatcttgctcgctcccacattctctttcccaggttcttacattctcttgacatcttgcgttcttgggtcgttgtttgtgactgagctgcgttctttgccaggcagtaagcatttgacggtgcctctcagttcccctcctcattggaatctgtcattcttttcgagagcccgtccttggttccctccccatggctactgactggcaacccgagtgccttgtcgctcagaaccagccgtcactggatcctgtgggagctcattctgatcgagctctgcagaataccactgggaatgtccagtcttattcagaccaattggctcatgctggtgtcactgctcgcgatgatcagtttcatcaatatagcttcaagtatcctcatggccctcatcctcaacccttgtcagcacctggcttgcatcaacagcatgtagcggctcggcttcatcaacggaagcttcgcaggcttcactcggttggacccaactctcagtcccgccgggcacaaagcagctatctcaagtctcagaaatacatggagtaccgacgtcgccctcgtcgtgatactggaaaagatggagagccagtgtggtctgatgaattggaagacgcttttcagcagggtaggttcataccaccatagtgatagatgaaccagaggctaacaaccgatttcagctctcgaagcaaaccctcccatgggtcgaagaaagtggtccgaacgtggcaagtcatatggccgcaacgagctgattgctgagtatatcttcaagttgactggcaagcggaggacacgcaagcaggtgtcaagccatctgcaggtcctcgactctttcttgaagggcgatcccgattgtgagttctcaaatatgaaagatgtgtatatcttctttttaacacagtatgctaggggagcgacttgtccgtgagccagcattagaacgatcatcgagtgttcatggctcagcacctgctccgaaatggagaacggcagtagagcacccctcgggatctagccactacggcagccacacacacccttcataccatgaccatatgagatctatgcaaccatatgctggagatctcccaccgccacactatacgcttgggtccaacatgcaggagactgctgctagcaccattcatggctttagcttcgacatgtgggtcagcgctcctcagcaggccaatcgcatcgacaaggcattgcatgcatacacccgtctgcagggtgatctgcaccaccccgttgcaccccccatgcctcttgagcatgtgaacgggtggcggtcttctttcccccaactggcttctatggtggatgacgtcaacaatcccctggattgcgatatcatcttgttagaagtgaaccttgagctaatgaccgacttccctcctactggctcacgactgggaatccagctcgatcttgactacggtcaccctagtgctggcgatgttttgggagtcagccagatggacaactggacctgcagcacgcatatctaccaagatagccagaagctcctagagacttaccacgacctacccaagacacagtcaactaaggtcaagcccctcttcgaatcatcttggtgggctaagctgttcactcagttgactcaagagaaacgtatagccgaggactcaggaaacccccaagctgctcgtgacgctgatgaccatgcccgtcaattcttccgctcattgtctgcagtgcaagagatccgtgccacctcgcccagctcctgccgtctgtctaaccaataccaaggccatcacggcgatgagagcaagcgcatggccgttctggcctggaagttccgacaaaccaggcctggcgaagttggcaccaccacttggagacgactaataccggcaccggaccggactacaaccaacagcccgcgcccagcctccgcggtcgatcgagttcctctctctctggattccatccttctcaacaaaccatcccaccagggtatttaccaagcccctcatcctcacgacctcatccaccaccccagccaatcccaatcgcaatggcccatgtaccaatcacctcatgacaacgtgtctaatctctataatccctccggccatctggacttcatgtcatccatcagcaaagccgaagatggactcaatgataaaatcgccgtcacctcggtgctggactccttctccgccagcctcgcacccgagagcatctcatccacaagtctccacggctccagcggtgcacccgtcatgctcaacgtgcatgacctaccactcacccacccagggatgggctacacaatgggccacgaaacatcacattacgtgccatcccaacaccacagcgtgaatatgcacgacagcaacagcgtgctacacggcttcttcggctctcacacgcaaccgcttgatgacctcagccacggccatgggtcgtggggtacgcactccacatccatacccggagacgtcggcgccggcagctaccatatcccttatcaggccgagcaccatggacctgtctcgcgcgagtcgcagcaaccacaccagttcgacggcctcttgccatcggaggacctaatggataagatcgtcgggcgcatgtccaatggttccggcatgcatggggcgggccccgatgcgggctacgataacgccactgtggatgcggtataacgacatattttacaaaaactaaagtaattataatcattctgggagtggtcttttgaaattttctattcctctttctgtctttctttgtgaatgtcttagctagcgcccggagaaagaatactttctacaccaatcacttacttctatttacattgcaatttccctcggctgaactcctctcatcagccactttagccgcaaaacagcacattttaggaccaactgaggtagattcgatttagcctgaacctttaaattttgtgtatattttcaatattactaggtggggtcctatatatacccctctatgccccaatttcttttttattttgttctcttgagatctcgttttcacaatggttgcccctactgtcaagcttaacagcggctatgagatgcccatcgtgggcttcggcctctggaaggtcaacaaagacacgtgtgccgaccagatatacaatgccatcaaggctggttaccgtctcttcgacggtgcctgcggtacattcactctctccaaatcaagccctaattgatactaacactattgattccagactacggtaacgaagtcgaagccggtcagggtgtagcccgcgccatcaaggacggtttagtcaagcgcgaggagctcttcattgtctccaagctctggtgcagctttcacgaggccgacaaggtcgagcccatcacgcgcaagcagctcgccgactggggcatcgactacttcgatctttacatcgtgcacttccccgttgctgtgaagtatctcgatccatcagtgcgctaccctccgggctggaccaccgccgaaggcaagatcgagttcgccaacgcaccgatccacgaaacatggggtgcgatggagactctcgttgacaagaagctggttcgcagcatcggtgttagcaatttcagcgcccagctgctgatggatctgcttcgctacgcccgcattcgccccgccaccctccagatcgagcatcacccctacctcacccagacccgtctcgtcgactacgcccagaagcagggcatcactgttactgcttactcttctttcggacctctgagcttcctcgagcttgaccttaagcatgctaaggatactccgttgctctttgaccatactactatcgccaccattgccgagaagcacggccgtacccctgcccaggtcttgttgcgctggtctactcagcgcaatatcgctgttattcctaagagcaatgatcctactcgcctcgctcagaacttgaccgtcactgatttcgaccttgagaccagcgagcttgaggccatcagtgctctagacaagggtcttcgtttcaacgaccctgttgctgtaagtttgttacctgcggtgtattgactgttttgactgttaatactaactgttcttttctttagtacggcctcgaaatccccatcttctaagtgcttgcagactcaaaagcccgggagacggaagaatctccgcgatataatgtcgatttttatagcttggataaattaaaaagaacatatcaattccaaaaaattctaaatcttcagatcttctatattagctagagtagcatgcagtcttgttgtactaacatgtacatagataggcaattccgccaagaagtgccgatctcgaagatccgccatctttctccaacttcggatgtcacgacttcaacttcccaataacacaactctcacaatggtgtcccctactctagcgcgcatgaccgcacaggttcatataaccgcatttcccatgccaaaaaacctatctgaaagcaagcttgtactggccgcgctccagaagtttggagaggtaataacataccgcaacctcaaggtacggcggcgccctctctaaattatcattcagacgagccccgatttaacaattgccttagtatgacacgaccaacacttcaccaaaccctaaccgccccattgtcgcgatcttcgagacagccgacgcagcagaccgcgcgatagcagcttcgcccataaccattcccctaccgacatccacctccccctctaaatctcaatcttcaacctctattccattcacatcaactaccaagccacctttaaatacccgccgctcactcatcttcgaaattcaacactcgcgccacaaccacgcctccgccctcaaacgcagccccttctactctacctataacctcttcaaaaacaaccccatctacgaagatctgatcagcgacgagaccagtatcccgctcaaagaactggctgatacactttcgagcaagaagtatcctattggcgctggcgtcaagtctaatatccaggaggaaaatcgccgcatgggcgcgacgagtttagtgaatatgtggaaggagggtatggggatagatgttgagcttgagaatgaggggcaagattttggcgagaatggtcctgtggttgaacatctcggcggtggcattagggagcccggggagggattggaggacgagaagcaaagctcggtagtctgagtcgaggaccaggtttggccttttcttgttgcttagatggtaactagagagggaagagactttcttttattctgggctgatccgcatcagcaagtccagccgaagacgcgctctccttttatgagcagttgcattgactctgggccgaaggcgcagattggattcccctcctggcagctccatagccgcgctttgcttcgaatgacttgcattcagaacctctgcttctcgagctcattcctcgagaaggaggaaggaagatgagaaggtagggcatcttgggatgttccaacattgccccccaagcagacatgatatttgtcgcgaaccagatgaccaaggcaccatttactacctaaataggtagtatatagctttctctccattcttcatcttcttctctctccttgtcccttttcttcccacgggattgattacactgtttctccaattgaccttcactgtaaatcaggaatattctgtatagtttaaactgagattacgtgaactaaataaagaacccagccttgatgtagtccacaaccttggtgatcttctcaatagggaaactcctcaagtggtactactgtggtagtacgacacggcggccgcgattgagctcgattttccgggaaggaggttcttgagaaacaagaaaggtcaaataattgtcaccagagtcctcatcgtcagaaggaatccccgggatatcaggtgcctggatgagagagacatattagatagtataccaagcatcgtatcatgtaacatactccaggatactcccagtcaatgtcaaccccgtcaaggtagttttccttgacgaaattagcaattttggtggccattgtcagtcggttggcggctttgactccctgacggaaaatattgtaagtgccggacatagtagaaaaatcccagccgccaaagatagaatctttttggcccggagacgcgcaaaaaactcttgaactgatattcgatcagaacatctgagaatttgacttcgtaatctgccattaattcaccaaatgcaaagtgcagatgtgtttactctgacccgttaatctgtgaggcatcctggtacagacaatcacgactactcaagctataaccctcgaagtaggcaatgtttcgcacaacgtcaagggcagcaccgcggacagtctccgtaccacagttagaaatgcaaccattcgtgcccttctccgcggatcctggagctccagtgtgccacactattctttctgttaggacgattgcataatctgtttcttgaggaaagaacttacttgaccccaaacattgcagcacgcattcagggggcaggtattgagatcggcaagatctgttgtgtcgtctggcctcttagtactcggcttttgggggccgcacacagcgttagccatgggggcgggcataggcggattcccgctactcaggcaaataatgctatcgacccagacatgaacagccatttcagcctcatgtcttcttgtttaaatcttccagatccttattctcagactatactcggcagcaaggtctgcacaactgtcatcttgttgaatagtgtaggtagcacacgatccgtccgggttaggctttggggtaaaatcagggagtgttccggatgagcaacagacatactgccctggtttgagggttgaacagaagttggttccggagttgtacttggttaagtccgcagcggagattccacactttgtggccagagcagcgcagcggagccgagtgagacaaagggacaagatgccaagagttagcgcggaaacgagcataaacgagggcttggctgcgtctacaatgcaacagtccctggaaggaaggccactaccagtccatctatctcgtaatagtccgattcaggggctcagacaacaaaacaactcattttcgccgtttccatattctggccctctatcaacttgttccctccttcattactagcgaaagtagtgagatcctcatgtactataatgtatatctttccgaattgcctttttctggccctatcgcaaattctcgcgtgcagttgggcgattaacacgcgagggatcatggaagtagatttgattcttccgcgcaatgttacctatccccctcgcttatgctgccgatcatattcgccatccaaaatccgagcctcctcaaaagcttcggtccgatacttgaatagagtattgagcaggagaactttagtactagcgatggaagtattgctaatagaatcaatgccggcggttctattcgactgtggaacttcaatgattccagcagcaaccctcacttcctctattggagtcacgcgcggttcgatgttgaaggaaccttcgcattttaatgggggatccagatagatggatgctctcgagatccggagacagacgacgtgagcttgggaagatatggtaaacgcccccatttctacttctccaccaagtttggcacttcaccgccggattttgtcgctgtgaaagacgatgatacttgcgaccaatcgttagctcaggctttcaatttctccgatcttttggagctcccgccaacaaacacagttccctacggaccctcctgtctagcccaaccgcctaggctgcctagggttaccaatccttgcaatgtcagaatggactcaccagccgcagcaagtatctcggcggctttaacctctactgcgtgtgccgtggctcgaacaggggtaatctgcccaactccatctcctaaaaatgcagcctctaaggcacaattaccgattggcggggcatgggctttggtaatgagtacaatactcatttagggtctcgcatgattcatgttgactattccccaagagacttgttttttgttcttacagggacagttcgctcaattgcacgctagttgttgacactctcggaaccaagcaggtccgtccgccaccgcaatgcctgatatgatataggtccgagtccatcatatcagtatgcagtagtcaaccaaaaagtgggacaccctaggacaaaagaagtaaatgttatcttatagccagtctgatcaaacgttacatccacgattaaacaagcacgtgaaggcaccggtatattaaagcagtccaggaacggcatatttaagagaagcaccatcaacatcccagtttgttttctctctattcaaatccatgggttacaaggccgccatgatctctgccaccgttgtctgtaacttctccagcgtacctaacaaaggcgatacttgctcgtccttcgcttcatcctggggtcagactcttgcaaatttccaagctctgaacattagcatctcttgctcgactctcacagccggccaaagctgctgtgttgttggcacagtcaaagacgagccagcgaccacgacgtccacgataaccacgacggccttgacaaccacaacttccacctcccagtatgatccaacccagtctggcattcctcctagctgtgatggcttccatctcatcgcatccggtgaccaatgcgatacgattgaggccaagtacggcatcactgaggcccaatttaaggcctggaaccccagcattgatagctgtatgcccaccacttttatatcatttcctcttctgtatattgtcattcactgacgcttttttactagcatgctctaacctctggttggactactacgtctgcgtgcaaatcccgggcgctacaacaaccacctcgactccccaaccgacgtctacggggccttggccgcagatgcctggcgtcgcgagcaactgcaaacccttttacaaggtcaagactgacgataactgttaatcgatcaacacgactgcggccatcacactcgcccagttccgctcctggaatagccagattgatgccagctctatgtctgcattggactgtagttcaccagtcaccttttgtactgagatcctactatcctatgagacgtttccatcatttaaaaggccaaaggaagggagtaggatatcgtactcgcagagtgcctaagctgcgaaattaaaggaatacaaacagtgataagttagaacatcaaaaacacaaagcaccagactcgacagttgtgtctgcctacatctctcttaccgcctcctaatttgtataccccgcttttgggttgaactgctatttgtacttcgtatgtaaactcctaacaaaataagtcactcctgtcctatcttgtatcaactgcttcttcatccattaaggagttggatctatagaaatcagctcgaatataccttttctgatgaaaactaacaatgcatatattgttatatgtaaaccagaagtgcaaaattctgagtggtacccaatcaagaaggcggtactggaaattcaggcaggcgagcaacaatgccctaactatgttatatatatatttagtctctagtaaccattctatacgggctcaatgtacctttcactagtaatgagtgggtttactaggtcaccaggtcaaggtgatgtgattcccgcaaaaggggagagtggcagtgctaggtcttggcacaatgcttggcgacactaaaaataagtttccacagcagcgccaagaaccaattgggcgctcgtgacactccgcgccagcggaaacgacttggcatattgctccctagctggggagaacagaaacccagagagccttttcaacatcaatatgtcgagagactcttatgttctgtgatttaaagtatgcgttagaagatatttgagtacagagtgctttccctaaccgcctaagcccgggtacaccgggtaaggggggatcttggcattactacactctcatttcccaaaggacaactcgacgccaagcgcctgagaactgggcagtgctgagcagagctgcacccataacaaagtcaggcagcaggattggttgtgccaatgtcttggaattatcactctgtacataatcccgctggtacggcgcctctctgccaagtgactggtttcatcgtgatgggttccattgtctttttgctttgtcgttataggggatgcacactcatatttgcctcctaatcccaatgcacttaacctctgctctccatctcctagtcccatgcatttcctccgatgtcggttaccgctcagctcgcgtcaaatgaggcctgtgatcctttctaggtggttgaccacccttttggcctgccttctcatacaaaatgtcatcgcaattgacgttaaccctgaggatgagagtgtgttcattttgtaccctggctaggcatttcaaatgactgacatatacctctcctgacagcttccctcaaagatgccgccaagaccgttgccaccaccatgatggatttctacaatgaccgcgactcgaaagatattccagggaaattggacggtacctggtgggagggtggttcaatgtttatgaccctcatccagtactggtatctaacaggcgatacccagttcaacgacgccatccaggaaggcatgtattggcaaaaaggcaaaaacgacttttttccaagcaactactcccaatatctgggtaacgacgatcaagtgttctggggattggcggcgattaccgccggggaattaaacttcccagaaagagacggtgaagcctcctggatatctctggcggagggtgtctttaatggacagattcctcgctgggatatgactagttgcggtgggggtttgcgatggcagatctggccttaccaggatgggtataatatgaaaaatgccatatctaacggcggattgttccagctgtcagcgcgcctggcactatataccaagaactcgacctatgccgaatgggccgagaagatttgggactggagcgcgtctacaccgctgttgaggaagacctgggttatcgccgataccactactaacgccgcgagttgcaaggatcacggtgatcatcaatggacttacaactacgctacgtatatcgccggtgcgggctatatgcacaattacgcatgtctatcccctgtccctgacaagtcgagaatctcaattaacaggttttatagaccaatggcgccgaaagcaaatggctcgaaggcgtaacaggactgatgaagacatctgatcagtttttccccgcctccggtgcgaagcaaataatatcggacatcacctgcgagccaatcaataagtgtgatcgcaatcagaagaccttcaaggcctacttcacttcctggctcggattcatgtcgttgatagtaccatccaatgtcacggcggagatgatggggaaattcaagagctccgctgtcgctgccggtcagcaatgctccggtggaagcgatgggaagcattgtggagttcgatggacgaagaagacggaatgggatggaacttcgggcttggagcagcagatgtctgttttgggtgttcttaatgctgtcatggttccattcaaggcccagggcccttacaatgctgacaatggtgggacatcccaaagtgacgcacttgggggtaccaacaccgagagtaacttggagcctgaccctatcaccacaggtgatagggttggcgcgggaatcttgactgcgatcttcgttatactttgggtcgggacgatatcttggatgatttttggagacaagtagatacactcaactgtgaaggcgttcaatacatgtacatatattgggattttgataccttgagggattcaggctttatgataatttctgattctagcagcacatccactacaacagaaaaactatttaccacattcagggaacagcatcatctaaagtcgcgtcgtcaaaaatttgtgggtcaaatagagctttctacaagctctctgaaatcgtactgccgacttagtttcttcttacaatcattttgcggttctacctagagaaagattataaagagcgacttgctatggatggtgagagagctgagggagatcctggatatacagaagggcaagtatgccttgaatgcttagacaaccacaccaagatctttcccccatcctgtacagtgcagattttcttgttctcctcttaggcctcctaatcctctaggttctcgggcttcttatcacccttctgagccttgtcgtccttctgggccgcctctctagctctcacaagtttagcgacatactccttagtacgtagcaggcgcagtgtagctgcattagtagagatgccatagtgtcggctaacagcgcccatgtcgatctagaatatgatattacattagtgctgaaacataactgatgaatgagagatgaagtcaccttcattcctgtcgctttgatacatgtaagtacgaactcaagcctgtcttctagtatctcacgactaggttctgaggcgagcttggcaggcctcgagataggcttagcaatagcattcttgttagccttggccttgataactctgttggaagccatggtgaagatgatgctgatatgagcttgtttgatgtaaatgtaaatgcgaaaaatattgtcttagattacgggacctagggagcggagagaagaaggaaggaaagcaacgtgaattaagatcgtgaatccaatatatatcctgacctaatagcaaacaactttagcgtcttcttcgcatttcggacaatattgtgcgagacatgacctcagcactcagttgatagcgtaactacggcggaaagagataaaacacaaccaaaaggaataaccgattcatttatataatagaagagaactttgtgtatcatgaggctcatgtaagcttcgcagattgatttccgtgggataattagcagagcaatgtccctgaaagtttatatagcatccatagatggattgtgtaggtcaacacagtggcatgtccttctagataccctcactgatgttcacactctactgcctttacattcccacgaagcacttcatacttggcagaatcagaacagtatcgcccacattaagactaggcctggccatacctataggatacattatttcctactttttagcaacatcaatgcacaactttgttgctaactagctaggtaagttacgaatggaagtccggcgatggctagcctcagaagcagtcattccaaagttaactccataggtccttgcattctacgtgcacaaattaatcagcttacgcttgattatagaacgaaagacgccagagctattagtcaaacagacaagagtataaaaaagacattaaggtattaccctcattcccctaaactcggacaaacgctataaggtgaagtatcatattagcgccatgttcaaaatcatgtgtatactgcaagagagtcggagaggaaacgcttactagcatcaatctgctggatgttcggcaacgccaagcgcaccttattccgataaacagccggcccattcaattgcaacgggttaccctcgaagtaaacagtttgcagcttctccttatccttcagctcgcgctcaacttcctggaagctagcaagctgattattcgacccccacagctcctcgaggttctttagtgatgaaagatgttcaagatgggagacctggttgttggaaaagtcgagtacgcggagtgtctcgttggattccagccctgaaaggtcggttactgcattgtgagagaggtagagctcttcaagctttgggagcgcggaaagacccgtgattttggtgaggcggttcgattggatggagatgatgcgaaggtttgagaggctgtccaggttctgcaaggctgtcagcttcttagtttgttaaggtatattaggtgacaactgcggaccttcatttcgacgatcttgtttttcccaagccagagttcttccaacgcggtcagtgtttccaggttttcgatttcctgaaaggactcgtgtcagcatttccattgttcacctcgtacccagtatcatataatacgaacccgaatcttattcgcgcccaattccaagttcttgatttcggtcaattcctccaagccctcgatacgggagattttattctgcacaaagaaaatctcggtcaacttcttcagatgcgagacattcttgatatgcttgatcttgttgaagctcagatccaagcttgtcaagttatggaactcctccaggccgttgatgtgggagatgaggttatcgtagaggtcaagttcggtcagactggcggcgacattaggaggaaagttgatgcgtgatatttgattctggcgcatgcatagtctctgtatatcctagcgcattagccatctggataaaccaaagaaatgcctcgccgttgcacttttgtccttcgaggaaaaagtggtaccatgcccctctccgctaccaggcacatgcggattccagggccgttgggagtatgtacctgaagtttagggaagcgttctaatttaagagcagagattgacgatatccggcaatgcacgaggtcgatatcctgcagcagaagaacgattagcaataatgtcgcgcgcgcgtcgatcagcagagtccagggctatcagcctacctctgcattgacatcttcctctgccaatagatctgaatgtccattagtctattgaatcgccaatgaccgcgccttaagcaatcaatcatccagcgaccataccttcatcagcctcaatctcatcgaccgggggtgcatccggatccgagtaatctgagtcctccagcgcctccgggtttgtaataaccgcctttctctccattcgcatttttccgtcccagccctccttgttcttcatgatttcagcctgcgtgagttgtgggatgtttggtggtggttggaatcgcgattgcggggagcttttggcgtttttatcgggagacgatcgccaacgggggattccgaaacaagggaatccaaggatatggagttgaaagaacaaagaagtaataaagagttaagagaagaggttgcactgcgagtcaggaactgaaaccttggtttcgggaaggttgagctcaactggtgactacatcatcgtcttaatgcggatgcggaatggctccgagacacttgaacctatctacttccgtgtctgggttcttaatatcatagataagaaggtagtaattaatggattaaattcatctctactctaatagaacttgctccattttgttttctggatacgtcgtctcgggggctatatacagcatcgagagccgtgattgatcaagtacattgcatgaatgaatcactccgacaactttggcagcgtaaagagaattattaggcactgctcactatgaaggaaatgcataccactgccaggcagaggtcccagcaaaggagaggacacaatgaaatgcacgctcgtgtattggtgagctgagatcaacacaggtaaggccgtgtaccagggcagaaatgggaaaataaaagcatatgggggatacagcggggacatgataaccaagagacgcctgcagaatgcataagaagcggacttgttgggtgttgggatgggggagaatacacaaaaaaaggaagatcaggacatgagggggtgttggtaaagcacagggaagaaaaagaaacagcaaaagaaaaaaggggaatgagctcctcggagcgagtgagatacaaaatcaaattgcaatgcaaaaggtcgaggatggtcaggttaatgtgctatccaagaacgacaacaaatgcaggagacggggccttggcccagtaggataccagttccatctgggtccatgctctgtcgtcgagaaggggaatcggatttgaagtaggaaatagggcgactacccatcaatggcagcaatgctggaggaacgcaaaaggaaagggcttttctcgcgtagaaaagaaagtggaaaagaaaacaattcgctcaaaatggatatctcaggcgtaagaaggatcccattgaggcgactacagggtgcagtccaggaccatgctgacatcttggaccaggggccctgcgagatcctcgaggacagggatgagatcgagcaactcattgtcatgagcgtcagagaaccagctactgatgggaatcgcatgctcggggtggaagatgtaggatgtgggggaattatcaatgatgattgtgtccttcaagtctcgaccgacttgtgaaagatcctggataatggttaggtttttctcaatcactgaagaggactaaggagctcaccttgacgtagttcccctggtggttataacaactctctcggaataagcggtgatgaaccacgttgtgaatatcaagttgatcaagcaaagggtcgccatactattactcgagttagtgtgtgtcactcgccgaaaactatcaactaccaactgacctttgaaaccgaggcagtgaataccaccacttcgtaaagttcaccaacgcgcttcatgaatgcgtccacgccaggacgtttaatcacatagatgttgtgatattgaccttcgatctcaactggaatggtgaagtcggcacgctccaagacctgacaaatcaatgatgagcgaaatgatacagtaatacgattatacgcccttgggcgcatactgaaagcggagacttaccttgaagctgctgtgaaccagtgtttcatcgagatcaagtaccaagcactttcggccacttaagtgaggcaaaggcgcagggagcaaaggatgtgcttcgtcctcataattgcctcgagcagggggggccgggggtgcaggtggcagtggtggtggtggtggagggatcaccacggggagtttcatttcttgatgagatgtggcttcttcttgcccgtcagtgccaaaatctttagggatggttgacgttgatgcagaagggaggtcctcggtggttgaggttgattggccctccccattgtaagtgtttgcatctgctttcacttcaggtacagattccatcacgattttcgtttgatcgtgtggggtaacatccttggtctgatctttctggccagaaaattctggctgcgtggcatccacagaaggaccatcgccttgcacactagccatagcagggtggatattgcggtcttcttcgccaggttgatcggcgctgactgtggagtttgctttttcatctagatatggctcccttgattctacagtgcttgagtcaccagtaggaggctctaccttgtctggagtaggcaatctgttagaagcaggtggccgcatggttgttttctttgcaggcaaagcagtgtcatctgcatcaacatccgaagaggagcaacagcccaagaaagctagaaacttagatggacttttcttttgttgaggctttgagggattgtgaccgggcatagtcgtcgcctctttactctcctccgcattcactccgttctgagtctggcgcgaccgtcggctacttgcccggctgtggtcccgtttcgaccgtaggatgctcactttggaactcctccgagaaggctcatcttgcgctgcttcctcggtcttttccgactcctgttgtttgttggttctcgaggatcgtcgcgatgggatggggatcaacaaatggcgtttcttcggagcgttgacgccttcagcagcggtcggtgtgctctccgatggtgaagaggctgggtcggaaggtgcgacagaagttgcgtcctgggttgcggtcgcatcggtacctctaccctgttcgggctcaggacctacggaaggaacgacgttagcaattatatccttcttgggtacaataggtaaaaaggagcaagcgcattcacttactggatgagcccggaaggccggaggtgttcataagtgctttgtctgcggattccagagctgaatctcgcgctgtgccctctccactcatcgagggtggctgtggtgtcaggtgtcccgacacggataaatataaaaaaagagagtgaagcgaaacagttcccaggtctgaaaggccgattcaatgccagaactctctaaagtcgagagcgcggctaataggggacgttaacacgcctcctagataataagcaagcgctctgggaagttcgcacgtaccgcctttggccccgggagtgatccaacacccactattgcactttcgaaaacaacaagctaaacgaacagaaaagggatgtgatatctctatcgtttaaaggaggattttcggggggagaggagtgaagaggagtcgggggatgtcacgtgaacgtacggtgtgggaaaacgggggggcagaggaggaaatgagatttatttcctttcttccttttttttacgctaaaaagggctaacaaggctagcaaggcacaggggccctttttcacacgctactacaagccctcggcggctacggtaaatgccgacttgctatcacagtgtgcagagtcataccccgtaccgagtacttggccgattctactttcaccatctatatgggattcttcaagttcttcttcactctagacatcatgcaacaagacatcatgcaacacaggacccgagtccaaacaagcagaatccttttaagatgatcccggtcagggcgcctgtggggggatctaattgtggatattaactgtgattgttatgtacggccccttttttatgaccactcatatggccagtaggaggagctatggccttcaaaacgtgattaatttcatttgatgtgacccaaattagatccagtccaaacaccaagtcgtaaactgcaaactaggttgtacctagctgttgatgttagtccgagttctcgaggttcactctctagttaggttaggtttcatatcgaggaagatgaacaaagccatgacacaggatatcaaagaaaatcatacggactatgctgtagagacaagagatgacaagggtggaaatatcgccacttctattattatcaaggttggcttcccaaatttctggagttcattggcaggtcgctggatgaaggctgggctgcagaaagagtacagtcagcttccccacgtgagttgcttctccgcatatccgaggttcacatgcaatgatgcaacaaaagccccaggatatcctcaactttactttcttgtcttcaaatgcattctctatggtttggaatacatttaaattaacttcatggccttcggtcgagtctagagaccgcccctcagttaatccgtgagtcggaggtctcaagccatttggagatggccgtccagtcaacccttcggcgtccggaggatcccctcctgacattatatcgccattactccgatctcatacgctccaagttccaccgcacatccaaaaccacccgcttgattgcaacgatagcccttcttttctccatcatcggctcgggttatggaggctatacgtggttccgagcgagagccaaggagcgggcccagggtagccgtctattacgccgaaactctggtatccggggcaaggatggatctcgaactatatacgtgccatacaaggactccctgacttccaaggtcttgatccatcccaccaaaccgactacttttgacgctcatcgacgactattcctcaaccccccggcatcgagtcgcagcaaagatgatggctcagcaagccagatccctccccctacaaccaaaccaggtctgaatttggcattcttgcatcaattcttgagtttgggtagtatcatggtccccagatgggggagcaaagagactgggttgctgatgagccacggcctttttctcttgatgagaacatatctttcactgttgattgcacggcttgacggtgagattgtaagagatttggtcgctgggaaaggaagggctttcctttggggtatcttcaagtggtgtggaattggaacccttgcttcatataccaatgcgatgatcaaattccttcaatccaaggtgtccatcgccttccgcactcgattgacccgatatatccacgacctatacctaactgacaataacaattactataaattgatgaacttggacggcggaatcggtcaagggcccgatcaatttatcacgcaggatcttaccctgttctgctcggctgccgcatcactatactcctcaatgggaaagccgttagtggatcttttcgtattcaactaccaactttaccgatccctcggcccccttgccctcagcggcattttggctgggtactttagcacagccgtggtgctccggaaactgtcaccaccatttggaaagcttaaggcagtggagggcaagaaagagggggatttccgtggcctgcactctcgacttttagccaatgccgaagagatctcgttctacggcggagccgataccgagcgggtgttcctagtccgaagcttcaaggagctgcagcgatggatggagggcatttatagtctcaagatccgctacaacatgctcgaggacatgatcctgaagtactcctggtcggcgtttggttatctgataacttctttacccatcttcctccccgcctggggtggctcgggtggtgcaatggagttggccgatgtatccgagggtatgggtcgcgagcgtggccgcatgaaggaattcatcactaacaaacgtctcatgctttcgctcgccgatgctggaggccgcatgatgtacagcattaaggacatatccgaactcgctggctacacctcccgcgtctacggcctcattgccaccttgcaccgtgtccacgccgatgcgtattacaccccacggggctcgcatcccgagctatattctcttgcggatgtccaaggcaccacccacaacggcttcaacggggtccgtctagagcaggtcccgatcgttgcaccatccctttacccaatgggcggcgacgagctcatcgagtcgctctcatttatcgtccattcgggcgaccacctccttatttcaggtccaaatggcgtaggcaagtctgcaatcccgcgtattgtggccgggctctggcctgtataccgcggactggttagtcgccctcggggcttcggcctcgacggaatcatgttcctcccccagcggccatatctcagcgtcggcactctgcgcgatcaagtgatctacccgcacacggagcttgatatgcgcgaagctggcgagacagacgcagctctacagaagattctcgacgacgcccatcttggctacctgccacagcgtgaaggtggctgggacgctcgcaaggagtggaaagatgttctaagtggtggtgaaaagcagcgcatgggcatggcgcggctcttctaccatgagccgcggtatgcattcatggacgaaggcacttcggctgtttcctcggatgtcgagggattgctgtacgacaacgccaaggagcgaggtatcactctcatcaccatttcgacgcgggcgtctttaaaaaagtaccatacttataacctgactcttggtctgggtgccgaaggcgaggcctgggagttcgagagaatcggtactgagaaggagaagcttggtgttgagaaagaactacaagagctgcggatgcgtctggataaggtggacgagtggaagcagcgccgcgaggaaattgatcaggagcttcagaaggtgtgggctaatggtagtgaagttgcaccgccgccttatcaggaggcagagcactctagctctgaggctctaactggggtaacagcgaattaaatgtacacagttattggcaatcttgaaggcttctcatggttgaaatccatctcctatgcacagtagggatatttctcagttgagtgttatatcgggcgctcatgtggcctctgtcattgatgacgtagtactttaataacccgacatatttaccctagtggctcaagataatattagggacgttatatgtaagaacacttcagtgtctttttgtactccgtatgttctttctagatgtataaggatgattcgaattaaagcggcaagaaatatttacctcttaattcaccgccttattaaagcggcggtatatcttatcgataagcccatcacagagaaaaccatagttcatcctcacttgctttcttgtacagagcctctgctcactgtctgcggccggatccttgagctgtattgctgttctatctgatttatttcggtgttgctgagcccaagcccccttacaatccaatctgcactccttgaggcagggaagacaaccatgtcttacagcagcgaggatgaggactccaatgttaatattatccccatggagaattttcccagcgatggagacatgagtacatggccctcaagtcactacattgaacgctccgacttgcgctggcggcagttacttgctgaaaactggctcaaagatatgggcacttatgaagatggtgagttgattgcagatgcttcagattcacgttttgtttggcatactggctttgtcgcactgtatttttttccgcattgcatttgttgggtgactgcatctgtcgtctcatgctcattcgttcattcgctccttcgtgctttgtgctggcctgttatggcctctcttttctgtttgtatactttatacctctactctcagactaacagagcatatattaggtgtcattcataccattgagaagttgcctgatggatactgtctatttgagcgacctcgtgggactaatcctagcatggtgggcctttctggtgttcccatcttgatttgcagctaacaatcatatatgaagtttgattcttttctttttggtcatccaagcggtcggtattttcaatcacagttatctttcttgccacatttcctctctctggtcaagaacgagcttgacaagtgccaatgcaagccctgtggtaaaatgaagatgagcgaagggactgcagtgcaagggaaggcgggacagaggactagacgcgttgtacaaccaagtgagtactaccatgcctcttacgttagatcgtttattgatacctattgagtcattgatgagcgccgacccaccgatgcagagggaccagattactggcgaatcttgattatgaaattgaaagataagggggccctcgacgaagatattgagcagcggttcaattttgactgggtattgactcacgaatggctttctgattactttatgaaactggttctggatcccgcttacatcccccgtcgtggtgagcttgttctctggatctggcagggtctcgaagacggctgcttgatgcgcaaccctgagactggcttcattgagatatttggcaacgataataagtggcatggtgtgcccaattggcgtgccggcgtggtgacccaaatcccagaggacgaagggcatatggtaaatatcattgaaggctccgataatccacgcgggctgagctactctggattccgtttggagactctgccagatccggtgggtagtgataagtcttactcggtgcaatatgcctatgttccgttgcgtaacatcaagccttttaacacatggcaactctacctcaatggccaagagcgaggggatattcacccatctattgagaatgccatgactgttatgtcttcgtggagcatggttcacaaattccatgttattggcacatggcccagcgccaggatctactgcaagggaatcttcgtcggggccgaactccttgccttacacgacaccgtccgtctgaggccacatggattccatcacgaccagctcaagtacggaacagtcggcgaagtgacagacgtgatggttattgaaaaaatcgcgctctatctttcagagtgcatcgacgacaacgaggagcagctagccaaacacttcacagccctgatatccggtaaggtgttcaccactgatcctagtcgcgttacccaagaaggcccattccaaggcagaaacccagtgtcatccggcggatcagcaactggtcctatcccactcactacggaagaagcaatcgctaccttccgccaggtcggcatgggcgactacggtccctggtaccgtatggccgatggtagaacctgcaacgtctccccacaccttatcgtgggtcgctgctacgaaccgctcgcggcagagcttatgttcggcacccatacaatgagttacgatctatccggcgttatggaaggtcgtcagtactcgtcacaagtcgattcgcgtatgcccgaaggcaagacgtggttctggggggattgccgggtggagacgctcggactgacagaaatcaacggtgtggaatgcgggcttacagcggcgcagcgcgaaaacccgcgcaagtggcaggcaatcatcaaaatatcacacggtgaagtcggtcacgatctccggggccaggccgagcttccttcttctgtcggccgaccctccaagtcttcttcgtccgctccgaagggtaccagctctcggccgagaactggtcttgagcatattgcgcagacgagtaaactggtcagttctgttatcggcagtgtacccgatactgaagaggactcttttgatgatcaagtgtatggtggtatctctgagctagggattggggttggtcattcttcgggggaggatagtgattattcgaatgagtaggttgattcgatccgatgtgcccgttgttttccctccttttagcggcatattcaagatacccatgggcgttacggagggataattctatcttgaccagatgaaattatgtgcagactgtacaatgttcaaatagtagtgtatcttattatcccacagctatgtaatcctgcagaacaaacagagtcaacatctagaagaataagcgtaaactacgaagaatattattgcaaccaatatcttagaagagaaatagattccatggctattgctttcatgtctatgtctaaaaactgacactcatataagaccaaatacgccttaaacctcactctgtccagcagaattccgcctagcgatacgtttcttctcagaccaggggaagtgaataacaggaggcagaatgaagctgttactgttatcagcaataccagcaaaggcattataccaagctaagaaagcaccaagcagagcaaagagcccacccgcctttatcaatttctcatttggcgcaccatccacattgaaaaggtacccgagggagagcaagagaatggcgatgtcgacgaagaaaaagagggagaagaatgccaaggtggatttgagagtgagcatagtgatcattgttgtgaagatgaaccagccctattgagagtaagttagttccaatctccttcttcttgcccggaataacatacgaagagatacaatgcaaacgaattgtaaaacatagcgggagacccattatccgcttcttcaagggcccctatgatatcaaatccaccggggataaaagtaatagcaagcgacatccagaaagcaccgtaagatgagagcacagtggcaccaaaggtattgccaatcgccatttccctggttttgttagctaaagcccgagtattcatgtccataacatgtctgaaacataccacatgccagccaaaagctgcacaaagccgccataaatcaatgcaggcccaacgatgatattaggcgcagtaatgcccctgacgttcatattgagacatcccagcacaaaggtggtgagtgcgaatgcgcacaggcctagtggtgccggattggcgagcttgcggtctttggggatgcggtatagacctggctggagatcacctccgaaggcagggtaacggctcgaggctgtgttgacgtgggctagggggccaaagtggcctgtttcatagtcgtcattgctggaggaatagttgtttgtatctttggcactgatatcttcttcgtgggacattataggttgggggcgtgaggtagacatagatgtacagaagagggaaagggggtatatagttcgagaggagggaatatatcccggatggcaatgcaattattctggacaaggttgacaagtttgacaagaacaattgcgagttcgttctgctttatatattgcgtagacaagtcgtggacaccatgacaccaccacgccccctcaacacatcatgatcaggaaacaaaattcctggggaagatcagcgccagtgcgggggcggggccagcccgaaaaagagtcttcggaagcgagaatagaggcgacaatagggggttctgctggcattgctagcattgctggcatcttggcataagagtaccccgtagtggagacaatatacagttccatccgtccgtagatgatcacattgcgagtacgagatcgtgatgtatcgagtaaagatcaacacgtaagactcgttctgagcctagaaattatggggaaatgcggagatctcctaggtggtagatcttggatctgtctataacagggttagcgagggtgactgtgtggggtttcggttccacctgtcggcatatttagcatctctagcactggattatagtgtaaatacttggcagaatgtggaaatctctgtcactgcctagattcatgtgccaagctggtcatcggggttcgaaacgcgtcactcacttttcctagatccatccgggctgaattcgccccccgggaaatccgcacgctctacggaaaaaaaggacaaaaactcaatggatgatttagattaacctcgttccaatcaaagcacaagctagaaacttaaaatccttaaactactcagtaattcttctgtacaacaccccttgcaaactccgcaaagctcaatccaggctgaacttcctctgcaaggttcggctgcgtgaatacagcaagagtattcctcgcaatcttctgcccaggactagccttagcccctttgacaaaatgcggcacggccataaacttgccgtgcgtgattagctgcaaggcctcaccagtctggaaagccagacaatccttcggaatgttgactttaacaatctcatcagtgcgggaacggatgtacagtccggccgaagggtcgggggaatggggaagttcagggagaggggcagatgcagaccctgacggatcgagacttggaggcgaagcggcttcatcgaggaacatggccgatgtcaagcccgtcaaacagccgtggtcaaggtgtgtagcgcaccagtcgtcatcactagtttcaacctcttcttcctgattagggaaataatgtaacagccgtgccttggttgtcaggctggttgtcacgacatggtgcagatacccaggcttgtagccttcgatgttggcttccgcataccggtcacatgccttggcgacgagtgccgcggtatcaatgatcagcccacatagtgactccacgctacccctgaattcgggtaatttggctggcgggggccagatgtttggcgcggtatactggggtagatctgggaaatcatctgccggggcgctgtctagagatgcatcctgatagaaggcacagttcacgtaatacgagccctttaatgtatcgaaatggcctgatttcagcgtttctttaccgcaagaccagccgaccaagtatttggactctgggctggtgagggtttctacatggaggttagtctgattttgcggttggagtcgggtggaggggcatcttacctagttcgggatcagggagagccgccaaatacgaggcattggagaggacctttgtgcgcaagtcgctgaaggtcgagggcaggtctttgaccacgatgatgcccaaagaggacggcccaaaggctttggtcagagtatcgaaggagacagttcctacaaaacttagcatctactcttcttcttctgttcttctgttcttctgaacacataacttaccatctacaagttcatgcagactgacggtgacggcctcggccgtgttggtctccatgatgttgtagaaattcaaatcaacttccccgctctcgtatctttctaatctcagagggcagctcttcgcctatctgccactaaatttcacacgatgttacttgatgcagggatataaataacacatccaataggagtcgagaattccatatcgtcccattcttggcatatcgtacagaccattactattacaaaagccctcactcgctacccgactgtccatgtcgtctagtcacagcccgtagattaccaaatggcaacacatcggtaattcgcttggcccccgtgaaaagcatacagagacgatcaaccccacaaccccatccaccggtaggaggcaaaccccactccagggcttcgaggtagctctcatctacctcgccaggttcatcagcagccttgctaaatcgtagctggtcctcgaatttgcggcgctgctcaaacggagagttctcctcctcgtatgtattcaccacttccttgccctcgataaagagttcaccgcgtgcggcgacgcgctgcttggtcgtcgggtgaacgaaggatttagagagtggggagaggcattcgggtgggttgatgatgaaggttgggttgatgcactgtgattcgacgtagatgctgcatagttcgtcaaggagtcgcgggagggttgggttcgttgggagtgggagggagagcttggtgaagatagcgtatactttgtctagggcgtcgggggattcaaggtcaggcagtttgtgaccagtgccctcttcgatgcctataaggaagtcgatacggcggaatggtgccgtgaagtcggctgtggtggggttaagagtgcctgttgtgtttaaggcgcggatgtgggctgccattccggagaggaggtcttcggtcatggccattagattctcgagattggcgtatgcatggtagaattcacaggtggtgaattctgcgttgtgtgttttgtccaatcctatatctcatcagctttgttagacaggcatttggatatctgtttcaacacaccctcattgcggaacgaaggtccaatttcgaagatcttgtcaaacccaccaaccaccaaccgcttgagccatagctccggtgcgattctcagcgacagctggcggtctgggaactcggtggcagaggtatagaacggacgagcaattgcgccgcctgccacagacccgatgatcggggtactaacctccataaaggatcggtcgataaagaactggcgtagatactgtaccagggccgcgcgggctcggatgatatcggctgtcgcggggttggctaggaactggacatggcgagggtagggagaggtctcgtgctcaatgtcgtgaatggggacatcatgcagacacggcgagagcagttgcggcaactcgctcacatcgatggtgagctcgcctcgtccagtgcggtgcggtctaccggttacagctagaatggcatttagcgacactcgagtcaggccggacggagacgagacatacagaaagcgtcgccgcgacgcagaagacgatagaacttcttgaagtcctcgggagagacattctccagacgacgcttgttgcacatcacctggactttatggccgtcctgcacgatatcgaagaagatcaatttgcttccggcgagtctataggtacggattcttcctactattctaagtacatgggcattgtaaaggccagaaagcagaacctaccagagacgatgactgtgtcttctactgaatcattgtcggcgagctcggcgtagcgagagcgaaattcggcgcagctcagtgtgcgtgtgtccaccgctaggcgagggtatgggtctgcgcaggcatctttgatctgctgtacgcgatcctgtaaagccttctttcctggtaatactgcagagctatgctttcgaattggctgtgtggttagtcgtgatgtaaagaaagtctgaatgcgggattgtctagcgagtcgcagtcctgcactaaagatttgggttagcaatgttcgagaaaattgacattgttgatccaaattaaagcattaagctttgtcagataaaatccagtacgttcagtgtccaaaaggacatcactgtagcggttctaatgcggggataaatcatcatataaggggcgagtgggaattgagggagtaaagcgataaacagtaaatgcaagtcttacctgtttcgtaggccaaagccagataaagcccatctagggcgaattgaaagcatagcaactgccaatggctctcacattgttaagagaagagaggaagaagaagaagaaacggcagaaccgagtttttccacgcgggtggcccaagcttctccgacctcccgtgctccgaatacgttggactttctggtgctctactccacatatctagcctcttaaccatctacattccaaatctactccaaacacatatacatcatgtctttcctcttcggcggtgcccccaagatgtcctcggcagagaagatcgctgccgccgagacagaagtcgagatgatctcagacatgttcaaccggtaagttgaagccctacagaatacccaagcgctatgactcgattcaaaaaccagaagactgcaaggaatttcattcaacccatcttcgaactatatatatgcataacccattctaacttgttaccgtcgcgatcatagcttgaccgagtcctgcaccaagaagtgcgtccccgccgattaccgcgaaggcgacctcaacaagggcgagtctgtctgcctcgaccgttgtgtgtccaagttcttcgatgtcaacatcaaggtcagcgagaagatgcagggcgaggccaacgccaacaagcagggtggcggcttcatgtaaacgtgttgacaacgagatttcttgggaaggagctctggtagacttgaagctagagagctcggtggtctttgtttctgtgtaaggctatttgactggttcggcctgctgaaaccgggcctgttttgaatgatggttcacgtttataccatcacggatggaaggtacgatcgccggtctatctctgaatatgtacaatatggtggatatgggaaaaacagagaatgaaaaaggaaaatatcatacaagtgtcgtcgttaggtcagaagcccatggatcgcgctatccatgcggtccaggaagtatcgtgctgttcctcgcctttgaccagggctttgattctcatctcgacatttacaatgtgacggtcaaagtcgctcaggccggcttccatgtcctcgaccttggactccagaacgtgtagttcgtagtccagtttggcacccagcaactcgacgcgtttcacgccatcggcgagatggtggctttcatctatgaggatgtcactagatcgttcgcgcaatctctggtagtcgccaaagcgttccaggtagactgagttgagctcctcatgtcggtcacataggagttggttgagaccttccacggagtccacttgtcgttcaacccaaggcacagtatgctggctcaactcttgaatccgtgagctgaaaatgcgtccctctgaggcaagcatgtcttcttgaacgatagcctcatccaggttattagtttctttgaccgttggtttcccacctaacggctcccatttgaataccacttcttcaactatgctgaacgacaggtgtcgtgcgcagaagttgtctcgccgttcaagctcactttcaagactttggaatgcttcgcaactttgcggccgccgcagggccatgacagctatcccgctaatcgagccgtcacggtcacgatccgttgacgctgccgtcgaccgagatataacgcgttccatatcggattcttcctcgattattggagcctgctgtacaatgggccagtcttgagcttgtgtttctggctcatcttctggcacaggttcgatatggatttcaggagcttttctctcagactcggaaaaaggggacagttgaggtttctcttcctcctcaatgagcttttcgatatcgtttgatatctttctttctgagcggaacccagagtcggttcgtgtttttgttgacggtgcctcgttatcactatcgatggacgggcggtatgcaagatcgtgtgtcacctcggagctgtctcgtgaagaatgatgctgatgatgatggcgctgccgtccgactgcatctttgaaacgtcctagccctgctcgcgcatctgaaactcgcccactgacgcccttctttcgatgatccttttcttcggcgggcggttctggcgtcttccaagagcgatctagcgcggagctcgctcgctcggcatgtaaatcctctgtcgaatgctttctgcgactggtccagacataaccaccttgttcatcggtagtaaacatcatatccgatccagttccccgggtgaacccgtcttcgacaccactcttgcgcggtttacccagccacagccacttggctctctcaccattgcagcactgaacaaaagtgtcaagatccagtgtttcgatatcggcaataccgcctttgtcgcgcccgcggaccatccccataaccatttcaccaccttgtccactcagctccgccatggttgacttcactgcatcggtccagccttctgcgttagcagccttggccgtgacacggtgtaaccggtccaatgtgagtcgatccagtcttcgagaccgcttcattttttgagacttttggaacccaccaattcctcttttcagactgtggaagtcgaatgcgtctttccccactggggcgccataggcgtgcagtctatttcgagccccaagcaacgtgcccagcaatgcagccacgctagtgggtcctaggctgctgtcgcttggctcaatgttgtacaggtctgttccgatatctgtccaccaatcgctaatagctgcctcagtcacatcacaaagtagcccgtccacatattccggggctagcttgtcaaacaccatcaaggcaatctggcattgtctgaccaattccatgaccgcattgtataaaggaaccctctcgcttgttcggtacaactgatgaaacttggcttcggtcgccgctgagggatgttgaagcttcaagcccgcgcggcctgcgcacccaagtctttttaagtcttcattcacaatgaaatcctcccggtgtttcttgatgtcgccgtttggtattggaataagactcaaggcagaaggaaatgaggccaaatcggtaaccatgaccgtccctagtggtgtttccttccttctggcgtggcattgcttcatggcgtcaaagtacatccgcaatcgaggcgaccatgtagtttcattggtcggaacactcagtactcccacaatcaccgtatgcgaagggtcaccggtataggtcgaaatgatgaatgtcggatgcacgcgagagcaggcccattgctcaacaatataaatttcatacccttgcagtgttacacgtcgctggagcacatcggtcgaagggtcttcttctaggtatcggagggcaaccgcatcagtgaacacaattcgctggtggccttgcggtgagggacgttcggctccagttgcgtgagaggcggcctccgatggcagagagtcggtacgatcgaccggagggacattcggagcgttgacctgcatgatggctggtctcctgttgggctcatatgctaaaggaacaagatgaaaatagcgccgaccattcaacccaaccttaaagtagatcacctctcctaagctcaagatacgaagggagtgccggccttccttcgatcctcctgcactcttggtcaggtcggaacagttgtgacatatccaggcaacagggtttgaggcatagcatgaacctgaaataaaaggagaaaggcaaatgtattacgggcgaacgccttgagaaccgcataaacccccgaggtgtgcagaagtggcgacgtcatttctgtacctgatggcggacggatcatgtgaccatggctgtctggtgttttagcctcaggcatctatgattgtacatctcccctctttaggatttaacagctttgaagagacctcgcgacaatggtcagcgctcccaagatgcaatatatctctgctaaatgctcaagagaaaaattacgaggctaattattctccaataagatctcttctacaatgaaatctctctccaatatatgacgtctgtcgggaaattacatgctaactcttatacagcaaagcgaatacggcatcaagaagaaagaggcaattctcgaaagtcatcaccaggatgctcgtccagcgaaatggcagacggatttacatttccgatagaactatgcatgttatgagcctatcaattcaaagcatgtgctcccaaagctctaggatatccacctccagtcacctctgtcctgctatttagcgtccacccggctgtataatagtcagcaaaagactcatgtgagtgaacgagctatacatactcctccatggggaccaccgggtccgccatgtccaccctggtgttgtccaggaccaccctgttgtccgaaacctccctgaccaccaggtccgccggggccaccctggtgttggccaccttgctgctgtccctggaatccaccctggggtcctccaaacccagggccaccagggccaccagggccaccctgctgctgtccttggaatccaccccgggggtctccgcccggaacgcccgcgcgcccaagactcatgtgagtgaacgagctatacatactcctccatggggaccaccgggtccgccatgtccaccctggtgttgtccaggaccaccctgttgtccgaaacctccctgaccaccaggtccgccggggccaccctggtgttggccaccttgctgctgtccctggaatccaccctggggtcctccaaacccagggccaccagggccaccagggccaccctgctgctgtccttggaatcccccctggggtcctccgccgggaccgccagggccaccatggggaccgccgggaccttgctggtcgccgtggtttccgtggttcccgtggttctcgtgctcgtgctcgtgcttgtcgtggtggctgaagagacccatggttgatgatggtatgatgaagtggggaggtggtagattgatgaacagtgagatcgagatgttatttgagtgtgagtataattctggaaggaaaaggatggaggggttacagctgccctttataaagactgagtggcgtcaccgatcagaatagagctaagacgctatgagctgaacctagtcttagacggggatgatggcatcacatcacgtacgacttgccgatgtggagtatcagaagcctatgattgggacgtgctgggtatctcctccacttggtaagagtatcgatcgatgaagacgtagccagaccctagatcgatttgccgttcttatttaatctattgatcgactccatcaatatatatctgagtatcggtagagttccagcttgcagctattcagtgtcaattccaatatgaacagccaactttgtaacataatattagcatttgcagattatctttgggggcctgtcgattgctgctcagtcttccgctgctgggcttggcgttgtcgatgcgtacgtacgcctctccacagctccagccctactccggactaaccatcttattgccaaaattctatcgcccaaacccaagagccgttctcggacttaattgccggtatttttttagcgtcggtcgtagtcatcataaacagtaagtgggtgtcaacctccggggccgtggaccaaccagcatgccagatgggcacagccactgtggcttgttcgtaccgccacattataggtccatcagctagccaccatcgggttaactagaccatctttgccatcatcggcgattagacagataaactacaatatagggttctgacagattataatttcaactacggagtaagtcctcgctatgtaagtaacccaacaccattcgggtgttatagcttaccacaccatgacggaaatagtggcaattgtaccttttgttaaagatttgcatacaaaaggcacatacggctcatcatcagtttctcgactctcgaaacagataggaaatttacagtcactatccgaggctttatattttctacaatgaacgatccataaagaggtatcgtatagctatagcgcgaactattgttgcaagttgttcgaaaacttcgcgccatagcatattggaccccctgcctacggtttaaataactagtgaagagggatatgtggatatgcacgatggacagtctggcctagcagacaagacgagagcgacatagcaataccaaccatccagggaggtcagctagcaagcatggggatcacacagaccgtagtagaaatctttatctcctaatacaacaacatcctgtaagctcctttttcattctgtaagtggtgactggtctagattctctcctctaggattctatgtagttgacatcaacgccccgatattctctccacgcctgaaaggtaaggccactacttgaggattccgctttccccaccagtaccgccttccttattaggtgcgaccttgtattctgccatataatctgccacaaaagacatgcattttgatcagaaaaaaaagtatattctacctgattcctctaaatttaaccccttaataataaagaagttgatatgacagcagttactttattttgatacaggattacatacaaattgcgactgtcttgctactacatatttgacgaaagtgatatataaaaatagaaggcggtgtgaagtgcgatagatagaagtgtggtacccgaatggggattggttgcttggcaaggaccgggtctcgagggaaatacattagcggatgttgttatattgggaagtcaagcaagtagactgtcacgtagttataaagaaaaaaaagaaattcttggtattcgtctcacgagcacagaaatatatatgtacattctaaaaaggtcgcgaatcgaatcaacgctataagttacaggcaagcgtctatacaataggacgtatccagccacgggctaaggcaaggccatgctcatctggactggttgatatccctttggattgtggagattcttgtgagcggatggcatcagatcgacaatcaaagagagaatataaccggtgaagacaaaggcgatgactatggagcggattagtataatatcaggcagtggacaggcgaaaatcatatgtatactcaccccattcaagagtagcagccatgttattctggttgtaatgggtatgctccgtgacccggaagacaataatgagggcaagttcaacgacaatgaacgaggatttgataagaaaacttgtcatgagcatgggctgccgcagggcatgtgcgatgcccagatagatataatccaagcacatcaaggccgcgctgacgagaaacccgacgctggagctgtcagtacattgtgacttaagaggtataccggatatatcgggtatagcggtcttggcgagggacatacataaagattgtcacgcagacatcgtgcatgaaatggtgggcgatgttgtcgaggacggatagcataatcaatccgatactcccgacaactgtgaaaaggaatgaaccgtgcgtgcacgctttgctgatgtatgacttgttttgaacatgttggtagaaagagaggtttagaagtaggactgttgtgatcgatccgatcatgaataagggttttaattcctgggctccaatatctgaaatgaatctgttcaaagatgttggttaaatcttggcatgattgaggatgaccaaagaaggcaagtgctcacggtatattctgaccaggcttcatcaagccatatctcggttcaccgatcatagtccagtggcctaacatagtgagtagcattgctaaatccaatgttagcatattgctcaatgcgatcgtggaaaattcaagacctcacctagccaagtggacgcggctacggccggaaagacccaggaagggaggaacattataatgtgtgcgtatagctaaagagtgtggtttggagcagcagtcatagtcttgttataacgacagtatcaaagagcacgggctggtgaagttggataccagccacatctctttactcaagtagttgacaaagagagaaagtgatccatccttaggttgggaatcaggcaacaaatattgtgcctgtcgatccctgcccctatgacgagggtcagttatggtatgtgggtctattaaggaattggcaaccccttgatcgttgtttcgtgtaagaagcacatgtttcgtacatgaaaggcacaagccgggttacagaattagcacaaagatggtgtatttatgtcgctttcatgaaacttgggaggtagataatgaatttggcatgctttgactgatatctatgcgtagaatgaaaaatcagattgcttgttgctccactgagctccataaaaaaaaagggaatcgagaacctggttacatatcctttagtaccattggtggggccggggctgggatatgtttgtcgacattgggaaagcaaagcatcatgtacatcgcaccgtttcgcacgtatcaaatgtggagatggaagtgatcgcctcgtggatgatcaaagcttgtattctcactgtacctgtcgcctgtagtgtatcagagttgcatcaaaggccaacgtatatcccttggcgaggatggaagggaccggggtctggaaggaaagtcctatgagcatttcacggatctcaaatcccggtgtaaagacgagagcaaccgagagcaaccgagaacaaccgccgctcccgtgactacggttgtacctgtaatatgatctcaggtaccgatttgggagagaaaccaataagcacggagtatctgtcttttgatactagacgtgtcaaaggggcatatgtgaggaagcagacaggttaagaggtgggacccaggatacacctacatgagttcgatgctcatgatgaggtatctggctggcacgttgttccgacgtttcaacctgttttaacagcacggcaacttcccggtcggacaaggggctggggtctgctttgttggccggtagggaatgcagtcagtagaggtacctagactgaaaggtggctgggagatgttctagtgatatgtcagtgactgtaattccacgacaggtccatggtttggctgtgttggagctccattgagatgaaacttattgatagcgtggtgttcggttcgaccagccggctgagtagacaccggcaccggcatggagtagccgaatgtgtacaggagtacggagtagagagtggatgaccgaggggtattacatcagtggggcagtgttgaccctacggcgacatttcaaccaaaaaccgataagaaacgcggatgaagatagtttatctagcagtgcaaggagtttcaaggagagaagtgatggcagcaaaaacaacttcaataaagactgcccaggtggctgccgtaaggggggaacagtgggccggctggcaagggcgaaatgtgatgcgacttacggacgcgtcagtcaggacgcgacttgttttgaaaattttcttttgaagtttatggattgtctaacaagatcatggaactatctaagcgttatctcttctctaagagccaccgacatgggtagcaagtagtgaaaagactcaagatactcgagggtgaccgaagtcgcccatcgaagaatcaaattcaaactcgaggactcaagagtcaaggagttgaggcagtaatgtttcaaaaattcccaagcgtgcggtaaagctcgcttgaagcagtcaatttggtagttttcaactagcaaaaacacgatctcggatgtctcctcactgatacgtgtaaaacccatgcactaggatgaagaagaaagaaaaaagaggaccaagtttgggggggagaccacctatttatattttcctattggctgaaggcagcagcaatgaaaaggtaggtgacgagctcggaataaaggatactccgaagcaaaatagccgtgtgcagccgtggatacccggaaatatcggagttaggcggagaaactatgaagccgaagctagatgtgatatatggacgaatacggaaggcggtatgtagtgccaaaataacgcccaggttacagggctacgaaagcctacgatgctgatgtagggtacagggaggcttacatggggttactcaccgggattcttggcctgaagctcaccaggcctaagtatataccaagctatggagtgtagattcgaagaagggctgattcttgtgaaatttggtgttaatgcgaggtggctgtgtaccggaagctggaaatgaataggataatttgtatgcatgtatgtagtgtatgacttttagcttcatggatggaatatgcgtgctcatgctgctcatctactatgtaccaggcctgggcaagattccctattgctccataatcacttgccattcaccttcggaggggttgaatcacgtggaagatcaccgggaacagcttgtctctcagttcgatttcgcccggttttctctgacggttgtctctatttcgctgcatcgttttggaacaaagatttatattgcctcaaaattttatatattgcatcccgcgccgagataaagagctcttatctgaagttctccacatggcgagactcggtaacctctccagtcacctccgagcatatcaaccgaaacccacctgcaatggaagtagtgcagaaagaacacagccgactcctcaagaggaccgagggctctcagggcatcaagaatgttcagtctgcaatcgattcacttcagtctgctcgcgatgccatagctgctggtcagtagtaaacgtgccccgccaggtttctcaactgacgacgtcgatttctccccaaatagatccatccactgcctctgccactctagccacccttcacaactcggttaaatcgtcctttgactctatcaatgccagcttgaaagagactcacagtggcctcaacaagtacaccaaatcgctagataaggtatccagaatactgatcgtccatgcgttgctaccaatctaacatctggaacagctgtttaaagatcgaccactgcctagcaccgacgacgatgacctctcttcacacgaaaccctgatcaaccgcgctatcgccatgcatctccttcgcgaaggtcagttcggcgtggccgccaccttcctctccgagattgccgaggagaagagaatgtatccagtctcccagaacgagcgtgtaccgaccaatacaactgcgagcctgctcgatattgacgaagtcccttcgaccgagatccggaaacaattcgcctcaatgtactatatcctacaacaactacaagagaacaggaacttactgcctgcgatcgaatggtcgagagaaaaccgcgaggcgctggaagcccgaggcagcaacctggaatttgaactctgtcgactgcaattcgtatggctgtaccatggcggagcgaacagccagggaaccgcaagcggatggctagcagcgctcgagtatgcacggcaggagttccatctcttcgtgcctcggtatttgagagaagttcagcagctagtgggcgcaatggcgtactcgtccaacctcagcgagtcgccatatgcagctctcttcaacaatactagctcggcctgggatgacgtagctcacttcttcaatcgtgagttctgttcattgctgggtctttcggcggattcaccgctgtatattgctgctacggcgggcgcgatcgctctgccgacgctattgaaactacagacgatcatgaagtcgaagcggacggagtggacttccgacaacgagcttccggtaaggaaaccgctactctgtgtacgaatcaacactaatatctgtattttcaggtcgaaatacctctccctccccaatatctcttccattctatctttgtctgtccggtttcaaaggagcaagcgaccgatgagaatcctcctatgatgatgccatgtggacatgtcattgcgcaggaatcgttgaaacgcctgggcaagggtaaccggtttaaatgcccgtattgtcctagcgaaagccaccccaaggatgccaagaaagtattcctgtagtgtaggtctttctctttctttctctttctttctctttctttccctgtcctcatatctctgggtatttttctttccatggcaaacgtcgatgagacacgtcttcagggagccgggtcttgccaggggcgttagcgtcggcgttcaggggcttatatgttgcggcattgcaatgcaggtccattcaaagctgtacgaagcactgcaatttaattcaaacctgacatcgagcataagcaagttcaaggtaaaataacaatctcaccatagctgtttcccaatggacgtatcaattacaacaaagaaaccatcagaatctgcgtcaataatccacaatccacaactatttcccaaataggaaataccaatttcctttgtctcgatggcggcatctgattggccaaatctaggcccgtgaccacgcgccgatttggcgacttaaaaaacccctttacgcggtcgaaactagctgtgacgcgtctttcgccgagccctacccctctacgctggctaatgagagctattcagtcgatcatctgtatgcaacccgtcccacgtcctgtaatatgctcagaatacaataatagatgtacgatgtgacttgtctccgtaacaaacgggagcttgtagtcctctctgtcttttataaatactgccacatctgcccctgaatccatccacagctgtctctatattatccccaatccagtctcctatcctatccagtccataatataatagcaatgttgtccaagagaacaccagagactccaattcctggccggtatcgcgcggcaaaagcttcagctttcacgctccagtcgcgccgggttcctcgcgacagaaccaaagatcgagtgcctaaggacaaagagcgagagaactctggctctggatctggttccggctcaattcggagtaagactcgacgacttgagcagcgtcgaagattcgacaaacccccagacgtaacgtaagtccatgcccatgtatctccatctccatctgcgtctacatttcatcatcaccatcatctgcaccaccaaatcattaatccaaccgctaacccgacccccagaacacccccaacaagtccaatagtaatgctccgcgtgggccccgaaaaccgcctcttcgccgcccacgaagccatcctctgcgcatcgcccttctttgccacgcactgtacagcccaaacaccggacccgaatgcgccacggcctagactccccctccaaccggcaagcaaacgcattgacctcccagacgagcaagccgaagttttctcctgcgtcctcgagtacctctacaagggcgactactacccgcggctgcgacacaacagccgaactcagacatgggagctggaggacgccgatgccggcgttggcgcaggcgccagtggagaattgggacaggcgacggcgacggtgtttcatcatcgagcgcagggggtgatattacgggatacggctatttagtaggttgaattttttttcttttacttattctcatctggctatgaatgtgtgtgtactaatgtatgtttcgacagctgcgcagcagagaaatacaaactcccccgtctccagcgtctcgcgctgcgtaaacagggcctgcacactgggatccagtgcagcacgatacttgcaagtgctcggttcgtgtacgaaaacacgccggatacggagtcgaagctgcgggcgcattaccttgcgctgattgtgcggtcgcggagcacttttatgcgcagtggaactatgcaggcggagatggagcgtggggggaaattgttttttgatctgtttgttgctttgtgtaatcatatggtgagtttacctttctttgcgcttggggatgaggtgctaatttggtctacgatataggatgaccctactggtcagtcggttgatagttcagctgttaccactcattgttagggatggtcatagttccggattaaggtgggttgttggctttttgactaatcgcgcggttttcgtcattttatatcgctgctggcagtgtttcatacccgtgtaccactatgtttcgatacctacagaatgaagagtgtgaatcaaggtgtaattctcgaaatgattgattcgtaaattcgtaaagataggatctaatatagtccagctagcccagttttgatatatctcgtgtaccaggccagcgtgaactggatgacactgattaagctggcgcttcgatccggccgatgaccaagtagttgctagtgtgcaatttgtatcacgtcaggccaaaattcttcggcagcggtgttagctcatgagcctgagtatcctggtatgtcgaataatatagctgcatgaatgtaagtcataggcggatgtgtgtatacctgaccattttgaaggtcctggcgaccaacgagggagttgtccatgagcattagacgaaatgaggttcaaacacgttgcagtgcattgccacccaaaagcgtaattagacacctgtgcccgggaaagcacctcccttgctcaagacgatgatgcctcgatcacgtgcgatgtatcctttcatgagtccctaaggaggcgacatgtcagtaaacacttacggattgattatacttgtcagcctaccttgtagatgagattggaaagcagacactccacctcatcaatatcgatgcgcgaccggccacttgtagaagtacccacacggagagctgcggcaaattcattcacatgcacacgagtacgccgaaccggagattgactctccttgggttcgtcgaaaccaccagcgaggaaaacttttcggaaaaggttgcgcaaggcaatatcacgtccacgttctaacggcaggtaaatacgtctcttgacaaactcttcctcgccgtcagacatagcctggtcgaatccaaccaagtcgccttttcggatacagttcgacagagaccggaaaagcttctcgagtcgtgggaatggcgcgagaagttccttggtggggagcgtgtgtgtggtcaccaggtgacagggaataaggtaggtaagaatcaatctgatagtggttagtgaaagcccatatatagctggagggctactgactctcgattcttggttgcgtctcgatgacacatcttccaagcccacgttagatgttcttcagcctataatgcaaataatcagtcctggtgatggtccacggacacagctcttgctaatacctctgggtaattctcatccaagaagtggatgactccaacgtaatattcgaaggtgacaatgtgagctttagggaatgcttcgggagggggaagatcagccgatgaggctttgatggcgcgaagcaagtttttggtaagaccgacggagttgatctaaaggagagagatgaacattttccgagcgacagtgaggttgacatttggtaccttgaaatacgtcttgaataggagattggtcatgttgtagataccccacttacgggactcttcagggggtgctctggatctgatcagcaatggaacaactcaaataatctaaccatatccttacctatcactcaggcacagagtgaacatccggttaatgacccgagcagcctcctccaagttcgcattcttctcaacatcagctgcgatgtcatcctggaacccaaatccagtggagccttgggatgctgcttcaagatcggcattgatcgcgaaagtacgcaagtacttcccgactgtgtacaagcatggcaatgtccaagccggaatgccggcagagcccgagtatccccggatgagggcattggcgacctttttccaggcattgaagactgtaacaacactagcacccggaaggtgatcttcacaccgaagtatttcgcctatagcttcccagtaaacagcaaagatgtcaacccaggcattttgttcggccttcggcaatttcagacttttcccatggaagagagcgtagctgagatccttggatatgtattcggcgttggagaactggtaaaaggagcgcagccgatcgcgatcttcggacggcgcgatcggggtgagcacagcagctaattccgggccggacccgttgaggtatgcgttcttgaatgcggtcgggagagaagtcatggtgaactaccctctggcgaaagagcgcgttgattaaattgattgtcaatttatgagttgaaaagaagcattcgaggtggggaaagggttgagatccgaactgaccaagacaagcaagagtccatacttttggagaaggcatgtggggaaggcgaggcaatgtggctggtgcaatgtggcggaagaggagtggcgcagtcagatggctaaatgggactagcgcagaacggaatgcctccactcgcttagggcaagggcggcaaccctaagcacaattggaacctcacaattctcattttccatcgacggcacactaacgactcatccaccacagcgacaatcacagtgagtacttgccgcttgattttatcggggatttatactaacattgaactcttccagatgggtgagtgatttctattcccttcccgatcccccaggtctttttttcgagacaacggtgtgcgcatattggttggacgaacttcgagacgcaaagaacacccacgatatcgcatgatgcaatcacaaaagaggaggacgcaatggcaaatcgatgtcgcttggaaatgtttatgaaggaacgcacaacgctgtcgatcagggctacgcatggttgaatctcgaagttttcaatatccacatatcacccttgctcttctcgaattttcgccaacctgcatcgcgcaccgtttcatctctcgaactggacatctgggcaattggaatatacactaggaactatggctgacggattcccagggcgtcttactgagtaccaggtcatcgggcgtcacctgcccaacgaggcgaaccccacgcccaagctgtaccgcatgcgcatctttgcgcccaacaccgttgtggccaagtcgcgtttctggtacttcatgtcccagctccgtaagctcaagaaggccaacggcgagatcgtttccctgaacgtggtatgttgggattgaatattcgaggatatggaatggtactcatcgtctcgtgtctagatcgacgagaagcgtcccctcaaggtcaagaacttcggtatctggatccgctacgactcgcgctccggtacccacaacatgtacaaggagttccgtgagatgagccgcaccgacgctgttgaggccctctaccaggacatggctgcccgtcaccgctctcgtttcggttccatccacgtatgttgcgctacccgaaccttccgacaatgaccatattctaatgattatttccctgcagatcctcaaggttgttgagatcgagaacaatgacagcatccgccgcccctacatcaagcagctcctccagaaggacctcaagttccctctgccccaccgcgccggtggcaaggtcggcaagaaggtcttcgcctactctcgcccctctacctttgcttaaatgtgatgtttcgggtgttgggtttggagtgtgtggatgaatgactgtttatggccatagcatgcatgaaagatggtcatgtggaaaccaccgccccgctcacgggcgagatggttggatgtctctagtcccccgtatggtggcatctttaggttattttgaaaaaatcatcgggtttcttgaattattcgagttctagtagcacaatgggcatacatggagagtgcttatttgatagatgccaagacatcatttcggatgtatcaacctgcaatgaaggccttctgattcctgtcaaagtctgtccattcacaaagtggccgtatggttgtactgttacacaaggtactcgttgcaaatcgcttactactggccatatatctcattgtaaactacattcatatagatccatgggggtcaatgctccatataaaatactaatcgatcctatcgccctctttacattgcagtttcggtcttgaagtaagggttgttttagccgcgcctgggaccggcttggatgccttgtatatcaggcacccacgtgctatcttcaactgccattttagttgcaagtctttgattggactggcaataaagactagctacttgaagtatcttatgactatcttcaagtttacttaaacagtctttacagaaccttggaaaacattggtatgtacaggtgtccaggaactattgcgtcattcgaaatcaggtcgggagggagctgtccgctttcgcatatgtaatccaatttcttcggggccttcccaagttcctcgtttccctcttaccccattccccaagtcattgcaatcatgtttgctcgtcaatctttccgttgtgtgcagcccttgaagcaggtaagttgaaaagggttctcaattgaatccccatactaaaaccgttcaatcagggtttccgcaaatactctgcggaggccgctcccaagaagtccaacttggcccccatctacgttggtgtgggcctcgccggtctcggtgctggtttgtaccgctacagcaccggcgcggtcgctgagcccaaggaccgccccaaggtcttcaacggcgaggactgggttgatctcaagttggctaatattgaaatcctgagccccaacgccaagcgtcttcgcttcgagtatgatgataaggaagctgtctctggccttcctgttgcttgtgagtagtctgactccgagcatggttaccaatcaatcactaacaggaatctagctgctctgttgactcgtttcaagcccgagggtgccgagaagaacattctccgtccttatacccccactagtgatgagggtaggaaatcataaaatgcgacttagttttcaaatgctaacacatagcagatatccccggttaccttgaacttgttgtcaagtcctaccccggcggccctatgtctgagcacatccattccatgaacgtcaaccagcgcctgtcgttcaagggtcctcttatcaagtatccctgggaggccaacaagcacgaccacatttgcctgatcgccggtggtactggtatcaccccgatgtaccagctcgctcgtgagatcttcaagaaccccgaggacaagaccaaggtcactttggtcttcggcaatgtcaccgaggaggatatcctcctgaagaaggagctgcatgatttggagaacacttacccccagcgcttccgtgccttctacgtcctggacaagccccctgcggagtggaccggtggcaagggtttcatcaccaaggagctgctgaagaccgttctgccggagcccaaggaggagaacatcaagattttcgtctgcggccctccccccatgtacaaggctatctccggtgctaaggtcagccccaaggaccagggtgagctcactggtatcttgaaggatctgggttacagcaaggaccaggtcttcaagttctagattattgtagagaatttagctagaatatgtcgctagttggctatgcgacaggatagccatgtatattggtgcatcttgttttcggcgtgttgccgtgtctctggctggcttcggacgtcatattatagaagaaatgcattttgcttccaaatagataatcatgtttatctggcgcttgtggttatctctgtcgcattaacaatgataagaactacataggtagatattaagagaggaaaaaagcatgtggaccataatgaagatgaagatgggaagggtggtggatatatatgtgtacaccaactggaaatacttttgcagaatacgatatcaacagaagatggcgccgaagtagtgttaatataggaatacagtaaaacaaaggaatctacacctagaattaattgaataactgcctacatacatatacatgtacacaaagtacctagttattggtagctaagtgacatacattaccaggcactagattatagagtatactgaaataattgcgccggcaagaaaagaattagaaattcagtcaatgcagttttaatgaattgaattaagaagtcagaataggcgttcgtactacaagtttgacaccttgtgttcagttaggtgttcagctgagcccgggcgaccctgaagttgacatagcgggggggagtagaacatagcccacatttgaatatgtccagcccctcaaaaaagggaaaagagcaggaatagtaccaaggactatatctgtgacataacaaaaagatctggagaaatcaatagttaactatatatgaatacaatcaaattccttagcaagtatacaagaataactacatggccccataaaagcctgtcatctgggataggtagttacgtatttattatgaatttagcaatccctaaaatattatggactactatcaaaggacctatgaatgacatagtttaagaactgaaaggtaatactttatgatagccaagtgaatagaataacatatggaaaggactccggaggtgcactgtgttgcctggggttcccgggggtgtgtcgcatgacaaggcccagagcctaagcctaaagcagagcgaaaatgcccggggcacttcgggggtgccttttgctatttagtgggtacccccccccccccccccccccccccccccccccccccnnnnnnnnnnnnnnnnnnnnnnnnnnnnnnnnnnnnnnnnnnnnnnnnnnnnnnnnnnnnnnnnnnnnnnnnnnnnnnnnnnnnnnnnnnnnnnnnnnnnnnnnnnnnnnnnnnnnnnnnnnnnnnnnnnnnnnnnncgatctccggtcctcttccccccttccccccccgaaaaacaggaaaattctcttttcttcaccccaacccattctctcggcttcaaaacaatggcttccaaccaagatgacacgaccgttcaggtcaacaaagaagagctcagacgggccagcgacttggtaattttttccctctctttttttgctctctgacttttgtattttctgcatttcggttcttttcttctgttcttctgttttcttgtgcgcattcccaagtgcgcgcctgctacgcgtcgcgttttaggatctataaagctacccattaagctgttgaagcttagactatatcatctcatacttcagcatcatgttggcaagcttcatgtgcaaaagaaaagaacatcccctgccccttctcctctattcagactcgcagacccatcttgacatcgcgactttcttaccaacttacgcgcttcctgactacccctcttgcttccctaaccatatacccatacatatacacaatgaataagcgtaattgcccttgatataacaccgctaacaatgcctcatagatcgtcatgcgcctcatggaggtgcagtcttacattgctgacctaggcaaggcctacgtccagcatgtaaacaacatcaccgaaggacgcgatgccaacattgagctccccctcggtccctctggattcatgggcccggattttcttttccgtgccggcagccccggtgctaagtctgaggctggtggccccaagaagcgcaagcgcgcgcccgtcgaccccaacgcgcccaagcgtgccttgacaccctacttcttgtatatgcagcacaaccgcagcaagatcgccgccgacttgggcaatgatgcgcgccccaaggatgtcgccgacgagggcacccggcgctggcagagcatggaagatacccagaaggaggtatgtattggcatcaaatcagttccagcttagtattgtactcaagaatacagagctaacacattcgcataggtctggaagaagatgtatgccgccaactacgaccagtacaagcgcgatatggcagcctacaaggccagcaacaaggttgaggaggaccacgatcccgcagccaaccaactgcaacaggactttgccggtgccgagcccgaggctgaggctgaggctggggtcgagggtgaggctgagcacgaggagtctgccgaggagtccaccgaatcatccgacgagtcgcagtccccgtctcccgtgaaggaaaagaccccgccgcgcagcaccaccaagcgccgccgcagtgataccaaggccaaggaagccgagactcctgccaagtcgcctgtcaagcggggtcgcaaggctgcggagccggtgtcaacaccggctgtcaagacaccggctgaaaacaagcgtaggaccaagaagcgcaagagcgaggtgtaaaggagtttgtgatgctttctgctttctgatttgcttgactccggggtcagatgagatgggtatcggtctgttggattggatgtgtaacccctcggtttgcctttttcagcggcgtttggagaaaaactgtacctatttagcctgaacgagtgaaatggactgatcataggacgtggtttctagatatccccatgagttctagtatctatggtaggtcagggctaaatagtaacccgtggacatacaaagccagataaaagaaaaacagactagatctcactaactccaactaagtcccagtgcattaattacatgtaggtagttgattagttaactatcaatttagcaaagccttgactaatgtcgctaacctccgttccccggcccaatcggcctccacggtcacttatcatgggcgatggccttatcagagaagaaagccctggacgccatttgaaatgtaccgcatccccacattcctcgcttttttgcctttcctacttagatctccttgaactgcatcttctacaccttcactaactcttgaggtttcaaacttgctcaaacagcctgaaaattcagttatcctgcacgccaagaactgccaggttcaggttccacatgcactatgcagcttattccgaaggaggcaagtcgcacatacattcccccgagagacaaacaactaacacccctgtagcttgacaagcttaccatcgcccacctaggcttcttggcacagcgtcgtttagcacgtggagtgcggctcaaccatgcagaagctgtggtatgtgtatcttcaagaggtgtaggacacgaccactaatatcccccaacaggccctgatagcctcagtgctacacgaggtacgacaaacgcatccaatcccctacaatgatatcaggacatactatatctccaattgattcaatgcgcaaactaactcaaacccccgcagttaatccgcgatggccagtactccgtcgccgatctgatgtccatcggcaaaacaatgctcggccgccgccacgtcctcccctccgtactggcaaccctcgtcgagctccaagtcgagggaactttcacctccggtacctacctggtaaccgtgcaccacccgatcagtagcgacgagggcgacctcgagcgcgccctgtatggcagtttcttgcccgtccccgcgcccgaggcattccccgacccggacccggaggatttcatgcctgagaagatgcccggcgcggtgattcctgttaagcatgcgcgcgtgcagttgagtgctgggaagaggcgtattaggcttaaggttatgagcaaaggggatcggccgattcaggtgtgtacatttcattcaatttacacggcgcaaaggcaaaaaaagaaaagcggagagaagcaagtgatgctaattacagtgttgattgccaggtcggatcccattaccatttcatcgagacgaacccgcagctgcacttcgaccgcttgcagtcgtacggtttccgactggacatccctgcgggcacatcgatcagattcgagcccggtgatacgaagacggttacgcttgtcgagatcggtgggaatcgcgttatccgcggtggaaattggctggcgaatgggccggtggatatgagtcgtgccgacgagattataaccaagctgcagatagctgggtttgcgcatgtgccagagccgcaggcggatagcgcacttgttgctggattctcgatggagcgcgaggcgtactcgcgcatgtttggtcctacgacgggggatctggtgcggcttgggttgacggatttgtggattaaggttgagaaggacatgacgacttatggggatgagtgttcttttggtgggggcaagacgctgcgcgaggggatgggccaggcatctggtcggtctcataccgagtgtgttgataccgttattacgaatgcgttgattatcgattggactggtatctacaaggctgatatcggtatcaaggatgggcttattgctggtattggtaaggctgggaacccggatgtcatggacggcgtgcatccggatctggtggtgggttcatctacggatgtcattgctggagagaacaagattgttaccgctggtggtatcgacacgcacatccacttgatctgcccgcagcaggtggatgaagccctagcatcgggaatcaccactttcctcggtggcggcactggccctagcactggatcaaacgcgacgacatgtacaccgggaccgaatcacctgcgccagatgatgcaagcatgcgatagcctgccgatcaacatcggcatcaccggaaagggcaacgactgcggaaagaagagcatcgaagagcagatcctagcaggcgcagcaggcctcaagcttcacgaagattggggctccaccccagcagcaatcgacaactgcctcgaagtctgcgacaagtacgatgtgcagtgcatgatacacacggacacactgaacgaatccggcttcgtcgagcagaccatcgaagccttcaaaggccgcacaatccatacctaccacaccgaaggcgcaggcggcggccacgccccagacatcatctctgtcgtcgaacaccctaatgtcctccctagcagcacaaaccctacccgccccttcaccctcaacaccctcgacgaacacctcgacatgttaatggtctgccaccacttatcgaagaacatccccgaggacgtggctttcgccgaaagccgcatccgcgcagagaccatcgccgccgaagacgtcctccaagacctcggcgcgatcagtatgatgtcctctgactcccaagcaatgggccgctgcggcgaagtaatcctccgcacctggcacacagcgcacaagaacaagacacagcgcggcccgctcggaagcgacgccgacagcggcgcggacaatttccgcgtgaagcggtacatcagtaagtacacgatcaaccctgctctcgcgcaggggatgtcgcatctagtcgggtccgtagaggtcggcaaggtagccgatctggtaatgtggaagtcggcgacattcggcacgaagcctacatctgttctgaagagcgggatgattgttactgccgagatgggagatccgaatgcgtcgatcccaactgtcgagccgatgattatacggccgatgtttggtgcgcgcgtcccggctacgtctattatgtttgtttcgcaggcttctatcgatgcggggattgtacagacgtacggattgaagaagcgcattgaggctgtgaggaattgtcgttctgttgggaagaaggatatgaagtttaatgatgctatgccgaagatgaaggttgatccggagagttatactgttgaggcagatgggatgctttgcgatgcagagccggcttcggagttgcccttgacacaggcgtattatatcttctgaggatcttggtggcttctttctgttttgcatgcttttagcttttccctttggtctttacagcttctttatacctcgttactcttctgagttggacattttgcacgatatggatttctatattctaacgaagcgattttcttttacttttacttttctcaaacggcacgtaagtcaataaggaaacaatcatggatcaagcgagctatctttttctccttttctctcctcaaaaccctaaagaagccaaggtcccctcaatagaatcaacaacaatcctatccgtcctgcgcccatcagtattaacaagaatatccgcccagtgcaacaaactagcaataagatcattgcacatgaacggcacattatggctatagaacccgtacggtttcgccaggacataagcgttgccacgagcatcaacagccatagccatagaggtatccttgatccgatgaacactagtaacaagctcacgtagactctcagaaacatcctcataagcctgggggtccgctctcagcaccctcgcctgcatccctaaaccggagacaaacgtcgcgcgctcacgtttaaaagccgacacagggccaggtcggggaggcataatagccatagcgtcgtaggagagacggtaggtcgaatatacgagaaacaaaccagtagtaagtgataatccaattccagaacctatctaaaagcacaagttagccacaatctgatcaatcagtctcgccacagcaataggaacgtcagtgcaaaggttatcgcgcagccgatccgcaagataggcacactggcccttgatcgcggcgcagtgcataggaacgaccgtctcgtagaagccactctgttgtactaggacgtagggatggtgacggctctcgacggccatcttcctcgaaagagaggcgacgatgtcgatatgctggatgagctggaggcggaggttggggatcacatacgcacggctgtcgatgtcgtggcgtaggaaggtcgattgctgctctaggagggtcacgaggttgtcgcgcgccttgcggaaggcggagacgcgggcttggtttatatgcgccatggtgatgcgaatgaggggattgtgggggctatagatctagatggaaatggaaatgttaatgtgaatgaatgtattggaacgtacctgggtctggagctgagatacagctacagctatagctacgccgatgttgatactaatgctgatactggcgtgagtccgcaactcgacggggtggaaatgaggatctagatgtagcccaggttagccagtgcatgttccagatggagtgcgatctcgtgctcggtgttgataatgggacggtggatgtggtcatggaggatcttggccatctggagggtatcacggccgaccatgtcacagatctggggaatggtgcaggtgaagtgggcgattccctgggaggtgacatatttcatgtccgcggcatcaacagcgagggcttgggaagcccacttcaccttgtcagcctgaaccttcagggactggatgttgagggcgacctcaatgaggtagttgccctcgggcatctggcgtaaagtggcgatataggaacggatgttgtttactagaataccgcgctccttccggtacttgaaaatagcccgagtaccacggaaaagtctagtaccgatagactcaggcattgtggatgaacggggaggggctgatgtcctctggtgatatagaaagggagagatgaatagatgaatgggatgtatcacttacctgcttagggctagtggattaagtgtaaagctgagagtagagtagactgaactggttgtactgatggagaaagaactgtgaggcggatgattcctcgaaatgtcaaggaataagggcctatttatgcatttgcatctcactggcttgaatagcctgtagacaaggccttcatcaagaagaaaggaatgaaaggcatatgacttgttgttgaggaactttgttctctttgtcctcagatatgtaagtagtcatgatgttgaaagaaattagtatacaagggaaggggaaggtagttgcagggtagaccaaggctttgttataatattagattcgtatggccattgttcagttctttgttctctatagtggaatcatcaagaaaattatgatattgatgctttactcgcgccaggtttttagggtttgtctcgacaatgtagggtcttttattggtggaccaaccttgctgtttataggcccacaaagctgatgtttaagggtaacagtgcagagtaagtgatgtattaatctggagcacgaaaatacttttgcaagtcagtgatccatctaggcaattctatgaaaggaacagaaacccacgatggcatagttcctgccattggcgaaatgctagatggcaagatcgagaaaaaaactcagaggggtatcatatatagtaaattgaagaagatagaaaaaacaaaaggacacagatccatccgcctaccaatatgaataaattatcaagcctatagctcaatctcctcctcaccatgatgatcacccgccgaaagaattgatatattcgtccaagctgagaaagtaccttcgcgcgcagctagataagcagcaacacgcgcatggcgtgatcgattcagattttcttctcctcgcgctgggtcccgtagcctatttccaacggaattttggtccggagagtcaaacgctgactcggagatggagagagcaagtatgtctgtgtgttgactgtctgttttttggttgattggatgaggagatgaagtaccgtcgccagttaggtcaatgatccctgtagatgtgcttggttcggacctgtgtcggagccctctagccgaaggttctaaatatggctggtcaggtatgagcgtatcctcttcttcacttccctcatcactggccggatcaaacctgtcttcctttcctgtcggccatgtagacgggagaggattgacttgaaacagtctaggctctgcatgctcttggagatatcggtgtgcttgacggatttcgttgcgtttaactctggccgcctcttcgaattgactcaaacgatgtagagagtcctgcttctgatcaggatgacggcttgcatcggcgataccaaggctcaaatcttcaattccactactggattcttgtgtggactgtgtagagaggtccatgtcgtaccgggccctttttcttgcgcgcaaatctccctcgccatcaacatgattagctacaatttgctgcatgtaattgtcgtgtgaaaaatcggttcctgagcagaggtggccaaacaggcgtctgatggagatgtcttcgttccaggtcgttggatccacggtgcatggatgaatgtccttgggccggaaggcagctacgagctcacacagttcggagtaggaagagtgtcgtgaatatgggaaccgctataatggcattagaggattatcgaagaaaacagtagtgccacttactatcgtgttgggcaggtctgtctgggacgaccggctagatgtatcagatggaccatggcttagagcggtcaccagattcttcaatgagatttcaccttcctccttcacgccatatgtatcaagcgagagcgccttctttctcgactggaaagcatccataagggcacctcggatctgagaaagggcttttttgtcctggacgtgtttgagacacagcttctctaactcgaccaatgtagattcatctggcagctcgagttcatgagtttgatacaaatccccaataccaccgcccgcaccgacctcagggatttccgcaccgccggttgtgcgattcacaatgggcacaatgtagaccgtgttagtgccgcgagctgccaaacatgagaccccaggctcgcaactgtggattcgactcgattcgtcgttgcttaggcagcctgttacagctctgtttcctagctcgaagccacagagagcagggacttcaccaacccccctattgcctggagtctggactagagaccgataaagtcccatctggtaacgatccacatggatctacgctaattagcgaatgctatgtttgagcggcgtggtatcaatcaccttcgtgttcagcgcagctgagagcgccatccaaacatcctcgtaaccgaatgtccacgcacggaagtagaagactgtatcatcaggataagcctggactttttgcagcagctcagacagtccctcggccttggaagggaactccaggaatgggtttgtcttgcttgcaaatgtagagtccagatacaggttatccagccgtttctggcccagagtatacggtatcaagaccgggtggcggactaggctgctcacccaccatgtctcggctgagaataatcagctagtagttcaaccaagatgagacatcattgactcacctcggatgtcacctgtgtaaatgattgccttctcgtccccttgaattagaaacatcacagccccagtgcaatggttggcatcaaacaacgtcactctgatatgacgtcgaggagtgagttcaatttctgttggggtattcagtggaattgggcgctgtgtgggatgagcacctggtcaactctagtcaaagtgtagaactatactaaccagaagctttgcgagatgcttatagtgcagtcggcgtgactccaagatgcctttattaaagttcatccgatggggatacttttcaattcggaggagtagctgcgcatggtcagtttaaagaatttaataggatacacaggagcgtgcctctcgcgtggctggcgagcagtagataaacggtgcccgaaaggactcgaggccctgtaaatgatcgctatgcacatggctgaggaagcaagctagtggtgccggccgctctgggcatttccgaaaatagtcaactgcttttcttagccgtaagtttggctgatttcataggtgaagctcactgcgaatatccggaaactctgtcggatgattagcgtgggcagtgacgtggaagtgccggtctcaccttctacgatgccattgaaggtcgacatggcaacacattcagaagctgaggtcagattgcatgtccaaggttgcccaggtgaagatgtgctagactgctagaatgctaaacctgttgcttgcacgtgatgtgaacatagaaccgaaagggtcataaaacaaatccaaatatgtccaatctttgtataataaaactaattcagagcattatggttcgatggattatattgcatagttaaatatgcgaagttcaagtccaagtccagaaggaatgtgttctacgccttaacagctggccgtgcatcgtggccatgccatgccaacgcacacttgggaatcttagttataaagcccaagacctgttgtctcttcccaaactattctattttctttctgtttctttccagtttctattttccaccttcttctgcaattgactatcaatggtacgcctgtgagaccttcaattcccccaagggtcaaagagccgaaacgtcagctggggcacctgatcgagatttctcttctcttcttaattattatatccagtgacttgcattacgggaaatccaggttgaagaagcatttctgttgtattctcaagaatttactatccgcgccgtctctagcgttgttaccccccactgccaactgaagctctcctcacccccaaaacatccacgtccaaacgtccgggaatttgacaaagggcaaggggggacccttcagggctggatatcccgaatcatcacattccagggtgcctaggacgacctcgcctcttttaatttgctcctttacctcttaactccctccacatccgaccttcaccatgcgtaaaccgtccgtgggtcaaatcgtgtataacgccacgtttccacgacctcgtccaaacgacccagggtcgtttggtgctcacattacccgaaacctcgtcccagaagtacgtgtcgaaacatccctcttctacggctcgctagactgcatcgaagcacaatacccggggctggactactcgtatggaccgcatcgcatgcgactgggtcgtttcccttggcaccgaaagctatttcaaacttttgaccaacttggtctgacagaggaggagatctccaatctgtgtcgatgggaagggaccaagtccgcgcgtcagcggtacgaggcagaagaaggcatcactgtacaggacactacagcccactcggtccgaccggcatctcctcaacccgccccgtcaatcgagatccacttcattgactgcgacttctgcgggacagaagaggaagatgaccagatcatcgagactcaaagcaatgacacggtccgtgcgatcgattcccgagcctccagttaccggtccgccgaggagcacgaaatcgaagaggaactaagcgacgaggaaatggaaagttgtggcgtagccctcaacaaccgaatccttgctgcgatggccgctcgcgaccaaggcactgatgtgccgctggatgaagactgggaacaatggctgaaggaggctggagaacgtggcagtttcggtgagatggtgcatgctattcgcgcgaaccagcccttgactcttgtcgccgacaatgtccgaatcccacgcggtcgcggtgcggctcgtgtggtgacaagggcggccttgttcacagtgccagacagcattatcgcaacaaacactgcacttccatctacatccaaccatgcctccggcacggctcaatgactgcataatatttactcgaccatcagaccctttggatagagccctgttctgattcgtgttttgcatttttacggcgcatcttacctctctcgcattgtctgaagtggactggctccttcttctcggggttccctttgcttttctttatctatatccttacgacacccccagaagattcttttgcatacgcatacgcatagatttcattgtctcctgtctcattttcattaataccctcatgttcctactcctcatcatgctttgttgtttgactcgttaactttttcattatttgctgcgccggggatattcatattcaacgtgttaatcgggggattttcagcaaacagcaaaaattattctaacttactcagaaatatatttacgaatatcattcccatgcttgtccaatatatgagtagcgtacagctcgatctgcagactgaatctgccttggtattgaacattattcaaaaaagctagtttttggggataaaaagagtggaatcaaatatcatggtcctgtccgacacgagaaaaatcccatgctatgccctcatctttgttagtgccgaccacgagctttacgccgtctctccgcatcggcaagaatccactgccccgatttacgaggaggacatagccgccattcggatgttgtcgcacacaaaacgattcgtagtcccggtgcaacttagcctccgcgataaattcacccttgttgttacgcccgagaaaggtgccggaaaccacgttttgaaaccccaacaatctctcgtcggattcgacgcatgaccagtggataccacccacgtactcactgtcttcagggacaaggcgtaaaatgcctctctgaagcccaatagcaaggcctgtcaaagggcagcggatgatgaatgatctgcctttccaaggacaatgcctagagcgggcttcgatatactccataagggagcctatggattcatcgtcaagaccaccagatgtgggtgtatcgcatttccgatcttctgtggtagtggaagacatcgtttcttcgattcagagctagaagggaaggatgttgatttcctttcttgttggcttgcggctaagttggtcaaccttattttgtagccattgtttgagggaagactagggatgtttacagattaggagcccctgtgagatgtgtgtagaaaagaatatctttgaataaggaaaagcaagacgtacaacatggagtgagttggtagacaaagtgcggggatagctagaaactatgtatcacatgatctgagctttaaccgtacacagtctagcctaatttggaatagtctgagagacattgacttcgataagctctccgctccgaggtccgctccgcaactgatctccatgccatgaacatgaacatgaatctcatttcagctttgtgtttgattgaatttggccaatagcctgcgctgattcacaccctgcttagctttacacattcatatcaaccctacaacacagccacgatgatcaaggcaatcttctatagtaaatttgacacgatagagggtaaggaccttcaataccatgatgaaccttgaattcgttacatactgactgatgttatgcagggcccaaagtcgtccatcaagtccccgacggagctatcgtgccctccccaaccgcgccctcacaaccacccttcctcactttctccgatgtctccttcttcgtgatcccccgccaggagctctgtgggaaccttttgcaagtctgcacaaacggatatcgtatcctgggatacccaatatgcatgaagtctgtgcggtatgaccggaatgagttcatcttcaacttctgcatagtcctcgcagaggaggacgactttagcacgtataagagcgtggtgcagaaactagcagatctaatgcatggcctagaagagcagaatggtttcttgtcccgtgatttctcgaagagtggtgaagggaaggtgtatagtctctgtgagatgttgatggaggacttgaacaactattgcgagtgcatgattcccattggtatgcccatgaacctgtttagcgtgattccgctgctaattattctacccagacgatttaaacactctgaatatcaagcttttcccgatatacccttctcccccagccgtcaaggcctggcaagtgccgctcttcacgttgcgataccaggctttcatggatgagaactgggatttgaccatgcaaagggtatgtgaaagatgacaatgagacccccccccacccccatatggctaggaagacagcagctgaaccccggcagattgtaccacatatcaacggcgtcaacagcgtccgcatcatctccgtactagcagacacagacttctccctcacctgccgcgccctccgacatctcctctactatggctgtctattcatcctcgacatcttctccttctccgccatctacgccccaaccgcccagtttaccgcaacaataggctccgacgaagcaatgcaactagaatgtgcccgctacgtaaacctccgcttcgcaccacacccagcaaccggaccctcctcccctccaccccccagccttatccccagcccaagcgccaacggcagcacaaatggcagcttaaacgacagctccgaaacagctcagctctccagctcccttaccgacccaacacctagcctcacacgggaagaatcccgcttcgacgccgaagaaatctggcccctcctaggcgccgaagaaaactcttccacctccacctccccaaaaacacccccaaacacgctccacaaaccagcgatcgttgacggcgccgcgctggtcgagctatacgcaagcctaaaacaaggccagagcgtcaagcaatggtacgcaacgcacagtcgctcgctagccaacattgacatccgtcgcttcatcactttcggcgtgataaagggcttcctgtaccgcgtgcacaaatatgcctgtgcaacgagtcagcctgcccccccgccgcgtgcgtcctcgttcacgccaacggctctgtcgtcgcgcgtcaataccggcaccaatacaccctatgcgatctctagtgtgtcggaggacgcgtctatctcgacggctgcgaggagggagtctagtcgtgagcgggctgggtcggtggtgagtgggggtcggaatgcgaatgggagtgcgggggcgccgtcggcgttttgggacgaggaggatgaggttgtcggggatgaggctcttgggaagtatcttgatggtacgcattgctttgatcagatttgtacggagttggagatgagtgagagggagctgacggctagattgaagaggtatccctgggaggtattgattcttcatagatgagttgggggagtttttttttggcaggtttttttatattgtcggaattgattgataccctacttttgcgtttatatggttcccaaggtaccgctggagacttgaagattgggaacctttgtctcattgtaagctcacagcttgggacttaaggataagaatatatgaacataatcacatataactaggtagttagttatagtatgttgtggaaaagacccagtgtaatttcaggcggactacaaaatagccagcagttcaacatttgatgttgtggaacagaaaaaaaagaggtatccgctaacgccacgctagtccatcatgcatttgtatcgtatcgtgcaaaaaataagtcaaagttgaggtggctaagaggcagccaaatgatagaagacgggttatcttcgagtgatgaagatccggcagagaacggagagggaggaatcattcctcgtcccagttctcaagctcggctttctcgtattcagccatgacttctgggtcgaagatcgactctccctcagagggaatggtagtcttgatgtcgtcaaagataggcaggaatgcctcgttccagcgacgacgacggtccataacaatctttgcagcgtctccgacagcaggacgggatactcccgcagaaccagcgacgtggctgccgccgcctgcgccgcctggccgatgcttgggctgagcacccttcttgcttttgcccatagtgcgggtgcgtttgagataggcctgttggacctgagagtcgaggtcgtcttggatggtagtaaactcaagcatggccatgtgctcctgggcaatctttagaatgcgagctttgcgagcattgttggtgacgatttgcctcttgagctcgttttggagtaagcggagtcgctcagcaacttcatcatcgtagtgagcgtcgtagtctggattatcatctgcaccgaggaaaccaatgaatcgcaattcggctttggcgcgttcgtccaattgggcatgatccagctttgcgaccgaggttttgaagtcgtttggatctgcgtcgcggaaggtggttgcagcagggagaggcttgacttcgcttttgttctccttctcaacggtgggttgatcaatgtccattgcgtccttatccagcccacttacactcgcagtatccccatttgcggttggattggaatcctcgggaaaggtacggtgctcgtaacggaggagagagcagaggcggctgaggagaggtccaaccgagacttcgttggtttcggctttatcgtcagtcagctgttcaatgctgccacggccttgattcaaaggcagctggtccttgtcatcttgactcgagtcgtatgacactccatcctcctccgcccaaatttgacggtagtttttctttgcgcggcggggcatgatgaacggggtagtgcgatcaccctgtgacaggtcagcttgtgctgactgaaagtagctacaattgacttaccctttcttttaaccaggcaatgtcctcctcggtaagaggccggacgtaaggttcaatgtaagtctggaaagtattcgcgctgacttggttggaaggtttggcattgctgaagtccttatcaggagccacacccgctgccatatgagcaagatcggtcttagggaagtgagaaacgctgtaaatctctttcttatcatcgtccgtcatgcctgggagaacatctcgaatgttgtagatggtggggtcgtcaaacttcagcgggttatcgccaaagacttgcacctgaggaatcgcaggttgaggttcaggttggtgggaatcggcactggtttcagacccgggggtcccggggggagggccgtcaacagcagtggttgtgccattgggggacatcatcgatggaggtgaaagcgaggaactttcatcagatatcgcatttttggagtttttcgatgctggagaagccgctgttggtagttagcgaaggctgaacggtggggaaagtgaaagaagatcaagttgtggagatgggtcggtaaaaacaaagagttggaagaaagcgccgagttggatcttttcttacctccctcaaccttagtctcagctccatcctggcgtgctacctcatgtgcgccatgatttaacggccgctcctcttttccacttgggcgctctttccgcttcttcagcttcccgcccttatgaatatcgtcgtcctcttcggtttcacgtttcaacttcgagcgatctcgaacttcacgatcaagctcctgatcgtccacttccttgcgcttttgagacatctcgcgcattccggcattgcaaacctcgcctcgaagatcggccatgtcactaagacccttcaggtgctccaccaatgcctccagtgtttttgaatctggaatgttctgcgcggagaccaggtccaacacatcggagtactgcacgctagccaagtcaatgtgcttggtgacatcgttctctaagtagctttggataggtagtgatgggatagcgggagcactagcgctggacggggtggtattgcggctacgcgactggcgcgcatcgcggcctttgcctttgcctttgtatgcggatggcatggtatttctgcagaccgattattggacgaagcgaaaagaagagatgaattgattaagataccaaagacagcagtatcaacgaagagagagattgattgacagaaaggttcctaggaggtgtggatgggactagacagacacatgctgtcgtcggtcactgtgagcgaataataatgaaaggagattgaatgtcccctaaagttgcctgatcataagctaaagcagacacaatctctcgatcatggatgaattagactttctagaggtgatgatggttggcggtcgctggcggtcggccagaatatgcacgtgatggcgatccgacatgtatcatcacgtgctccatcttcaattcattggttcctgagcacttggctatggaactttgcctttgagcttattcaatttttttgcactgtatatacagcttgcacctcaccacttgttggctcacacatggtctagccgcccaagaatgtggttgaggttgaaatctgatacacattcctacagttctgcggagggagccccgatatcggctactccgacattctgagggatgaggcagagcaaatcatgtgttttttgtgaattgttgcaagcgttgaataattactatttataacacagtctcgctagttaaatcccaatgtcaagtgtaaaaggttggaaagttgcctgttgatgatcatctcctcaaacggtctaccgtgaacggccatgtttagcgaagtacacgatatagaccacgcgctcggccatttccatttgttgactcgttcccggagatatcttcgaaatgtgaaactcagtgtatcttagccaagccgttttgcctcttgcctcgtggttggaaccagtattgttctacattcttgtgacggtcccgattgactctcgcattcttccgctgtagagctctaaacagcaatggggatgtatgggatgcttcagggctcagcgtcgtcttaaatgactttgcatagaaccatagtggttgccattttcaaactctttcatattcaacttgtttcccctacgccttccccgcgggtctgaagcatttagactcatagtatatactttacttgacagtcaccttcattattcacttgacccaagatcagatatattatgtcagctgctaccatgtcaacgcgaaatgactcggtgggtaaagtggctacactttgggcaggttcagggcaagcttcgaattccacctcgtcagtcgaagtaagtctgccttcttcattaaaagccgacaacagcatttggaactgattctaactcacataattacataggagaatgtcgcctatcggtttgttctcgaccataaggttcaaacaatatcgagcaatggcatccccgaggatggattggtatcaggcctcttgtttgtacccagtctagagccgcatgatccgtgctatgacattactgcttcgtccgtgccgtcaaatgtgacccgatatgaagatgtgtctgacttcggatactccctcgttggccttgctccatgggtaactgccgaatgttcgctatcgttcctctcagccgcccaaaaggttggcacgcacgctatgatctttttccagccgtcagataacgagaccggcataccacctgactcgaacgactctcgctgggcaaccagtgacggagataaatggcgaatggacaacgattacccagtgtacgccattcctggcccagctggaactacattgatcaatgatctctcgtggtattcaaataagacacccgaagacaagagagacaactctaccgaaaattttgcgctacagacgaagacaaaccgattgtttgctaggattgagactggtaggtcacaaaaatgcgttactttcgaatctatactcacatatcgcaggcgaagaaacacaaggggcgtcgacgagcgtttggagtttcgtacttgcaattgcaggaacagttcttatactcagtatcctcctgatcattatctatcgatttgtcctgcgtaagagacgcgctcagctgcagagacgtgttaatgcaggtcaagtcgacatcgaggccttggcattgaaccaaatgacggctcctcaagaggtggttaacaaaatgccacgttatacatacttggagatcatccctccaacagaagcaacgctgccacaagataatacatcggccaatccaatcgagcatggctctggagacaagatcaactcgctatggctcaaggaaaacaaccatgcccaggacgatgctggcctccagaaacccgaagcagcgatgataaagcctaaacagaacgatacttgcagaagcaagtaccgtctgagccatactcaaacgacttgtgctatttgtctcgacgattttgttgttgggtcatctacggtccgcgaactgccttgcggacacatattcgactcagcgtgtatcgatccattcctgacccagaactgctgcctttgtcccttatgcaagaagagcgttttgccagcaggatcatactatatctctgtgacgaatgaaatggtcgaacgagagcatctttcgagacgcccttgaatgcagcacgggagactgcttttgcgtgcttttagattatgccagcatggagagagcgaggattactagttgcatttactaagcgaggcgatttgacgatcttgatgtttttgtatgatgttttgatagtgattgtatcaaatcaaacaatttaaacaaaattatccaattatggaattacaagatcagtcgccacttacccggtctctgtccttgaagatggtgcttctagtatgcctgttttaatcctggtcataagaaggcctcttcctattttatccttttactttcattcaatattgctcagaccattcatcactaggacatgtaattaccaaattagaataattttcagcctgaggcaggcagatgatgctgacacctgattttcaaggcaaagaggaagctcacactgtgattggccctggtgggtcaactcgctaatcgctagcgtcccacacacaacctctgcctccagaccttttcttcctcgaacttttgcgacaacgacaaccgacgacatcgtacagccgacaaggtacgttagcatttttttttcaatacaatctccgccgcaagtgcacttctctgacttataaccgtccagatgggtgccctcaagtacgtggaagaaatccagaagaagaagcagtccgatgtgattcgcttcctgctgcgcgtccgatgctgggaggtgagataaatcccttcgcccccgattgcctaacatctccgccgagcactggtgtgcgttgccttaggatatgccgtttttatgtggtattgctaggcggctcgaacaaagtcattcggcggaaatgattgtggcacgcaagaaaaccctttcgggcttcatgtgtcttgctatacactcgttgaacattgctgagagtgcataatatagctccgccagctgaacgccatccaccgtgcctcgcgcccttcgcgccccgacaaggcccgtcgtctcggttacaaggccaagcagggttacgttatctaccgtgcccgtgtccgccgcggtggccgcaaacgccctgtctccaagggtgccacttacggtacgaatttttcctgtcgagagcagatttcctagagatctgagggaattgaaggaatttttttagctaatgtgcgattatgtgaacaggcaagcccaccaaccacggtgtcaaccagctcaagtaccagcgtgctctcaagtccaccgctgaggagcgtgttggccgccgcgctgctaacttgcgcgtcctgaactcctactggatcaaccaggactccacctacaagtactacgaggttatccttgtcgatccccagcacaaggccatccgccgtgatgcccgcatcaactggatctgtaaccccgttcacaaggtaagtttggctcgaaatttgactgtgttgcccgcgagctttgctgatctggtccccctttctagcaccgtgagtcccgtggccttaccgccaccggcaagaagtcccgtggtatcaacaagggtcaccgctacaacaacaccaaggctggtcgccgccacacctggaagcgccagaacacccagagctactggcgttaccgttaagtgcggtagtgcactttcccagtggtttcggttggaaaatattggttacggcatgtggtcatttattcaaacacttctttcccagacagtgttttccacgctgggctcaactttaatgcagaccagtcggttctgttgttagccaaaaagccatcttgttctatgtttcaattcccttattaacgaagtatgactggttcagctcaatggtactggcattgtagaaagtgtagtcttgaattagtgctactttttactagttctatgtatgcatgtatgcatatcactgattttcaactcccagtgtcacatttgcgggtggtgtactccgctggacttgcggtggccagtcgccgttagatcgaacctcagtggatcgctagaaagtagtctagtgcacataatacatattcagactttatacgctaaggctgtctttgattgttattgtgtaacgatcatcgatgtgcgttctaactagttaacgtaatccactaccgagctggccacaccaccgagctggccaccccacccaaaacgcgtccatgaattagcacttaatgaattcaaccacccaccatgccactaattcgctctcaaagctctcgaaattcaatagagcaagaaggcaggatcttattagctatccaggctattaagaaccgagaaattagttctattcgggaagcagcacgcatcttcgcagtactgagatcgacccttaccacgcgcctccggggcgtacaaaaccgcgcgatttctcggcctaactcacataaattgacagaaatcgaagaggaatcgcttacaaaatggataatatctatagattctcgcggatcagcccctcggccctctactgttcgagaaatggcgaatcttttactcgaattgcgcggaataaccccggttcttttagtcggcgagaattaggttacaaagtttgtaaaaaggtatcccgaactctcaagccgattctcaagacgctataactacgaatgtgtaaagtgcgaagacccgaaaactattggggagtggttttatctcgttcaaaaaactatcctttaatatggtatcgatcccgacgatatttataactttaataagactggttttgcaataggattaactgtaaccgcgagggttattacgagggctgaatattacggttgccgatcgcttttacaacctagaaatcgcgagtgggtgactgtaattgagtatataaatactttgggatagacgctccctctgtatatgatttttaaaggcaaagtctttattaaatcttggtttaacggcctccctgatgattggcgatttgaagttagtctaaacggatagacctctgatgaaattggacttcgatagcttgaaaagctctttattccgtcgacttctttatagacgaaggggaggtattaacttctaatacttaacggccatggaagtcatttaaccccgaagttcgacgaaatttgtgaaaaaaataacattattccaatctgtatacctccgcacttatcttaccttttacagccacttgatatcggttattttgcggtattaaaacgcttgtacagttggatggttgaaacgaaaatacggagtgggataaattatatcgataaacttgatttcctcgaagcttacccgtccgcccgaatcgaggccttcaaagaagatactattaaaaatagcttcggagcagctggtttagtgccttttgaacctgatcgagtgattttaaagcttaatattcgccttcgaactccgacccccctttcgagctaagagagcgagtgggagccaaaaacgccttcgaactataaacaattgctaaagcaagcttcctcaattaaagcattgcttcgtacgaggtctcgaagccctccgagcccgcttaattctgcgataaaccaggttttaaaagcctgtcaagttacaatgcaatcggctgcttttctcgagaaagaagtaagcgatttacgggctgcaaacgagaagcagaagcaaaagcgcactcgatctagaaagcagataccttctaccgagggcctctcggttttagaagcatcgatattaattgtgcagccagaggaagcaattgaaccacctccccctcctcagctaagaaggccttcgccacctttattaccccgaacgagagtgttaaataggtgcggagcatgtggaaatctcgggcataaaagaaatgcatgtccagatagacctagatagatagttttattaatttatggcgttttggttgagatatattgatttaaaattcagaggttggttttggtggccagctcggtggtgtggccagctcggtagtggattacgttatttagactttcccatcaccatttccccatctgatacatcccaacgaggccaatttcatcgtgagttttatttctatctttacacgcttctaatagctaacatctacacttggactaggcactctctgcgtggaccctacaagcaaagtcaagactctcatctatttaccctcatctaccaccaagatgccatccagtgacgcacttcgtatatacccccccttctgcattccaacacaaattgttatctatggctgactttaactggaacagaaccgcctcttacgcccgctgagcgggcaattgtcaaatcctacggcggtagtggattacgttagttacgaaattagacccgtagcccgaactttcaggtctctaatctaaaaataggcctttaatgccttaggcatggaccacttccccccccggcctctttcccaatccgtctacagactatgaactgctgtaacgatccatcactctataatagagtccgaggtaagatagtcatttgctcggtgagacttgattagattactgaaggtccatttctgcaatagaccaacctgtcatttatcaaacaaagaagcaaagctcgctttactcgactgccttacccccactccgtcctcccgtcctccacgtatgtgtttggtacgaaggacaagctccacgagctggattacatactggagaggtcgaatttgatcaaatcaaatcacatcaaattgatgcgcctctatgccgtcccggcctgaacgtcatctgcctatccctccgatctcaagtgctggcaacgccgccatccctggaatacacccttcccaattttctggactggaaatcaatccacgccgtatggctcgacctcgcgatgcttcgatcatgcccccattaaacggcggtacccccaagagttcgtaccaccgaggacattcacgctcgatcagcaatccgttcgctgggtttgggcgaaaacgggacaagacagtcgccaagtatgcgacttgggactctgacgatgatgacgacgatgaggtaacatatcccttggagccagagtcgtcaagtccccggaaaggtgcagcacctggaaatgatctcgccgagggcaagtgtcagacttgtgatgctaccgtccggtggccacggcacttgaaggtgtttagatgtaccgactgcttgatgatcacagacctcgagccgatttctcatgattcaaaagacaaacccccacaagggtctcagggtggagcgtccaatttggcaagcaaaggtaacacctccagatgctagttttgcgtcatatatttgtaaaagatactgatttgctacctagtgtttcctttgacggccaatcaaattcgtggtatggtcggggggtgtctcaacatgtatttcgatagccttttggacaatagccctcggtcatggttgtcgccggacgacgacagaaagaacaaaccgctacctaatcttccgccaatgcaggatcatgcctctggtccaaaaaatctctcgcccccacgcactggcgattctcggagtcgtagtgcttcccattctagtgaacgggaaaggttggcggcgtcaaaagaaaactcaggttacttgacaccaccatctgttcgctgggagggcaatgacacgcctgtcagagtccgagcaaattcagatctccgatcaactccaaagctagacagccgcacgcaagacgtttcgcaagccgggaacccggagtttcaaagctgcgacaatcggacacacattttcaaacggctggaaaataccatcgccactgccttcaaaggctgtgactgcctcaacgaatctttcactacatatccaccacctcggtcagcccgagcagctagtaatggtaatccaccgaaaacgaagatggaaccgaccacaatgccccaaccagcgcaagacgctccagtttttgaaccagatgccaaaactcttcttttaggagatttgactgagaactcctcttggtggatgaatgaatgggctgagaccgaaggccaaaatcccgcatattccaaagagaagaacaccccaaagtctcggatgatatcatcgcgaagtcctcggatcaactggtccgagttagcccagtggtaccattcgatcctgtccgcgggaaattcttggaatgagctctgggccgccaaaaagcctgaccccacaagatcagaagcggatctgatccgagccaagagatgggcgtctattgatccgtccttgatcggaagacaagtcagcgagtctcgtttgcacttacaacgggcactcttgaaagctaccgagggcctcctcaaacgcccgcgccgtgttctgaagaaaccagaagataccaggttcttgttcatattgttagcgaatcctatgttgtcttcacctgcgtcttattatcagaatacatccatctcgccgtctcatcgagatgagaggcgcccatcgcatccaaaagactacctgaaatcggcaacccgagacggaaaacccttgcagaaagagccgcacaaagcccctgctcgtctagatggctccagtcaccattatggaattatcaaacgaatcctgggactcgcgtctaatttgcccaatgactgccatcactacatcgtgtcttgggcttcccgtttctctgttagacatttcgagcgactggtagaacttatcggtggatttctcacttaccgtttgagtcgccagcatgggcgaaaacgccctcaaaatcctcaaaacggagatgatctaataccgagctttgccagtgcttcgggaaatactgctgcggaactccacgctgcgattaatcgaagtagcccgaacaagaagcctggcaaaaagaccgaagaccccataatatacgccgaggactggcagatcagagcagcagcaagagtaatgtcgctgttcttcacggctaacatctcctctgcaacgaggaagtctgatggaactccgcgcagtcttgaagttcccaagaacccaggccctcgtcaaggacatatgattccaatcagtgcattctacaatacactgctggactattcggatttagtggcggacttcgagacttgggaggctaaagtctcgaagttttcgttctgtcagtatccgttcctccttagcatctgggccaaaattcatatcatggagcatgatgcgcgtcgtcaaatggaagtgaaagcacgcgatgcatttttcgacagcgtcctcaaccacacggcggttagtcagtacctggtgttgaaggtacggcgtgagtgtttgattgaagacagcctgaagggagtgagtgaaattgttggtactggccaagaagaaatcaaaaagggtctccggatcgaattttcgggcgaagaaggcattgatgctggcggcctgcggaaggaatggtttctgctgcttgttcgagaggtctttgacccgcttcatggtcagcgttttccgatcttagagtgaaatgactcgctaattcaaaataggcctcttcatctacgatgacgattcgcagtattgctacttcaatccttattgctttgagtcatccgaacaattcttcttggttggggttcttctaggtctcgccatctacaactccaccatccttgatgttagtctcccgccgtttgcgtttaagaaattgctgtcgtcagcggggcatgccaacgggccacaactggctacttccttgcgttcgaccttcaaatgcaccctagaagatcttgccgagtaccggccagctctcgccaaaggactccggggtctgctagaattcgaaggcaatgtcgcggagacattctgctacgatttcgttgcccaggtcgatcgctacggcgagattatcagtgtgccactctgtgcaaatggcgagaaccgaccggtgaccaactccaacaagcgtgagtttgtggatttgtatgtccaatatctgctagacacagccgtggctcgacagttcgaacctttcaaacgcggtttcttcacggtctgcggcggcaatgcactatcactattccgaccagaagagatcgaaatgctagtccgcggctcagatgaaccactcgatgtcaattctctccgggcggtggccacctacgacaactggtcacacccacgaccagaatcagtccctgtagtgcgctggttctgggacttcttggagaaatcagaccctcaagcacagcgcaagatcttgtcattcattactggtagcgatcggatccctgccatgggggctacaagccttattatccggcttgcttgtcttggggatgactgtcctcgttacccgattgcgcgtacatgtttcaacacgctgggcctttaccgctaccccacacgggggaagttccagcggctgctctgggatgcagttgtaaatagcgaaggatttggcttgaaatgatttgtttattcctgctcgggacttgtgttactattggtgtttgagaatttgtatagacgctggacgttgatttcgaagtgagctttgcatgttcatactttgcgtcgtgtttgctttctttcttttgctcttcattccgccatggagtaccggtgctgttatttcttgccttgcaaactgcacatgaggttttgtgtcttgtttttattgattcagtcttggtgactgagagagtctcgttctaatttgcattcctggacgttgttttcattctagcacacttgacatagattgatagatccctcacctcaccttcaagcgaactcccgagccttccatgtcaggaaagaacaactcaaatttccccatcaccacaccaacctcatacctttgatttaagtgatccgtaagcatcgatgatcacttcttgtatctaaatttagaaagtccaagaccatgctctttcttagagtttgtgtagaacaatgaaggaatggtttaatcaatggcctatatcgagcgttctctataaatttttcttatataccgtccaaatcatatactaattaccaaaatgcgagataacagaggcagctaacggtacaaaataccatcaaccatctcaccaatcgccaaacaactcgtcaagccagggctttcaattcccaacaaattgacaaaaccaggaagaccctcttcttcctggataataaagtcctggaaccccttaccctcattgacagcaccgttcctccctaacttagggcgaataccacagtaatccaacgcaatagcactaacgtcgacaccaggcatataagccttgatctccggcagcgcttgctccaaacgcgcagcactcggcaccaaatcatcaggactatccacccactcaacatccggcccaaagcgaatgcgtccagccatgtcaagagtcaggtgcgtacccagtccaccagtaccgggcaaagtcaccggatataccaaaaccgaagtcctaggcctggaagccgcatacgaaaagtacgtgcccttggcataatgcggaacgaaatggcgctcctttgggaggagcatgttactgatatcgcacgcgccatggccagcactattaaccaacgtctcggcggtaaaagaagtaaccgagccatcctcatccgagacagcggtaatcttatacccgccgcggccgccgtcgatagcctccacacctgtcacgcgtgtcttgaacgcaacatcgcctccgcggtcctcaaagtcgccatgcaggtaagtcatcagagagtgactgtccacaatgccagatgtctcactctcgacgatgcctgcgtctgccttgacgtctggttcgcgctgctgcgcttcgtcacgtcccactagccgcgttggtgcgtcgcctagtccttgtgcgtgcgcgtgcaatttcagacaggcttcccactgagtagggttttgcgccacgatccatttctttgtgttgcgatgggggatattgttctgtgcgcagaggtcgtagaggaggttgcggccgcggatgcagagctgagttttgagggaggtcgctgggtaatagaggcctgcgtgaattacctagttggcgaggggttgctgttagtttgtttgggttgtgttggtttattggaaactgttcaggtgggctcattgtggagattgcatacctcggagttgcgactgctcgtctctgtccctggtgcgtcatgtcgctctagtagaatggttgaggtgccttcgcgagctgcaagttgccgtgcggccgcgaggccgacgacgcctgcgccaattacctttcaatcagattagccttgtgtctgtcttggatctacctaggttgcactataccgcatgggtgaagtccgcattggtgggtcgggtgctggaaaagcagcgagtggggagcttatttataagcttaaattgctgcttaagcagggcacgtgcagacatatcgggagggcgcaattgaccagcagcctgcaaggaaggagccctgaagtgtgactttggtaggaacatccgacctccgacctcgggaatgacctcgggaatgacatcgggcgtgatcccgaggcccatatattggaactcaaaagtatgcgaccctggaactataggaatatcaaaccatagattctcatctttcatcatttgacatctaagaagaagaaaggcaagtccgaatgaaaatgaccgctagtttctgactatacatagacaaagggggcaaagggaaaccccttatgaaagaagagtgaagacaattgtttcagtttctaacaaagactcgacatgaactggagttactatttaactgaccataaatcccatcaattaacctgaccatatcatagtgagcacatctcgagtcatctcaagctcatctaaatccacacttctcacctgaacgaagatgatccaaccaggtatgttctcccgccccgatggctccaacatcgcagagatcgacacgaaggagtttgtccactgggtgacggtagacttcagcaaatttggcggacgaactaggcccaatagcggcgagagcatgatgcgtctgatggctgagcagtgcagatctggagtagccactattacatccgtgcctcagcatcatattcggccatgctgtctctcattgcccgtcgtcggaaatgccgagctcgtacatgttcatattctgtggcgtgcagctgagcttgctgattggcattgggaggagattatggccggtaaggagacgcttgatactaagcgcgttctaggcgatgctccacggttgtctcgtaaaagggtgaatggggcttaatattacctcgatagatgtagtttatttcgaccgatcgatcatagggctatattctgacagaagataatgctgtcaattgagttgtttatcatcaactcaaattcattaataagtgatggtatgataccatatagaatttaaagaagaatgttttatcttcaattcgcataatgctgtgaggtagccacatgcttattcgacgtccatgagaacatcactcattatgtataaaatatacgagaactttttgacgctccacttcccagagtccttgagaagagatgcataatcaagcaggattcgacgcgcaaactgatacccaccgtggaacggcagtcctcgcaagtagatagtagccccgttgcgaatgaagttaacagcgggatcatccgtcggcgcgagagcctgacttcccctaggctccatgaaactagtgaatccctccgttcccactgatctccagtcgacatcatccatcaactccacagacccgacactagacggcgaactagtagaggccggaaccatgaacgtatacagaccgagcactaatccagccgagaagagcgaaaacatagattggaaggtgggatggtcagaagctttgcggtttgtcatgactttgtagatttgtgcagcgtgcaaacacgcgcgtctggcggcaggtgtctgcgaccattcacggatatcgtcaagcgccttacgggcaggatttgggcctgcacggccagctgcaaggtcgaatatttggatatcggcggtgagagtcatgcaaatgttgtgccacgtaatgagagcgttaggattgaggcgatcgagggtttcgctgtagtttgtgatgagctgggattggagggaggggaggcacctggctcggccgtccatggcgtaggtgtgacatggagcaaaggggtagctggctctattggagaggaggcggtggtaggcttctgactggcggagctgaactattgctagtattgcttgtatacagaagtcatctgcgggagcttctagggtggggatgttgatgttttcggatggggcgaggatcgttgatgagagaatgcgctttccgccacggattaggtgtttccattggatggaggagctggcgctgaagagagcttcgctgcaggggaggatgagttggattgagtctgggactgtgattggacccgttgagaggaacgaggagtaccaagagtctaggagcagtaatccaatgattattcttgggaagactattagtgatgtgcgatataagtaggaattttggcatacctcttagttgattcgaccttgctccaggctttccatctcatttcattatcaggaaccgtttcgaacaaagtcatgtcaagaatctgtccttcagtggctgaaaacagaccatgtctttgggcgacctgcataattgtcattagagtcacatcgatagaggaaaacaagaaggttctcttccaactcacagacatgacattgatataaagaggttgacactgttctagatgtactttttcctgcaggatgacaatgattagtacctcgagttcagcaaacttgggctaaggaattcataccccggtcaagccagctaggtttaataagagcaaaactgtcgcaaacaatgtcacggtgccagaagcgctctcaagtcccattgagcatcgggcaaattcagctgttaccttttccaaagtgccctaatgactgtcagtaagctacctgcatatatgacgcgattaacaatagttgacctactgagaaatttctggacacaaacgcagttgttcctttcgtgccaagtaatgtcatgccaaccagcgtcataacatatagtagagatggtcgcaccttatttgccgaaaaggttggtagatggacaaatggcaagaggggattaaagatacggaaaaataaatctagtgccatatccaaaatctcagcaggagggaaatcagagtaattcaatgtcgagacaggcgtggctggaggaatattcctatctgggggtgactgcatatgcgcagaaagagtcatcggtccaaaagccgcataaaggcgccgtctgcaattctcgtcgaatccataccgggatccttcaacagcacttgcctcattgggagggtgtaatgactgaacggagaaaatattatcaaccggcgacatgacgatatcccgccataaactgttaataagacgcccggtattcggtggtgctagccagcactgctgaactctagcgaagcgttcattaggaatgctatcgctgctgtcgactgaatgtcgattctgctggcctgaagtaagattcaaattgtcaccgatcagtggaaaatggctatcgcgcatcagatctagcgagtcaattgaagccgaagctgtgcgtggttcaagccacatttgtagcatgtcttttggcccagggtcgaaggccgagccagctcggtgcgacacatgatctgccgatgtgactgcattccatccaaagtactgctgctggtcatcgatcatcatcatattgagatctggctcggtgcggccatggtgggctgaaatgtcagctaggtaatctagtgatgatgggagcccagttgatgcgagatgcgcatctcgcgaagtggtagacagaggtggaatctgtgcttctgcgccgataaaaccatttcctggtcccgggatcaatgatgcatccgcaattactgatgactgtcgatttgacgcttccgatggaccggctgtcgcattggcttgattgtggcccttggcatgtcggctcaagacatcgctgtatgctcattaaatttaggtatttgaacataggattttgaatatgttacaattcacatgtgccttcaatggaatttaccttcgagagaaacgcttgtggcagacattgcattcgtatgggcgttccttagtgtctgttttgtatgttagattgctcttgcaggggttcgacgtaactgacgcgaccgctcatgcctcttataatgttcggtttttttgaacacccgcgaacagatggaacattttttcaacaccatcacggcgctctcgaaaagatgaatgattacggtacatgtaaccctcaagacttgcggaggggaaaatatattagtcagcaagtccggggttctaaccttggttgactccactgggactattccgcattgggaaagttgataccttagaaagcaggcacaaataatgcgatttatctgaaataaatatattctaacattgcaggcctatctagtctcattttcagattctgggatacctgcatttgcaacaaaggaatagagatcttcatccccatccgacggaagctgaccactgagcatgagcatccagcccaacccagactcgagttggaaatcgcgcgtctcaggctgtgtgcttaaagaccttccattattcgggattatggagtcggatccattaagtgttcgtgatcgctttctgggggggtaactagccccatcgggtccacggtccggcttagtagcacgggtacgaatctcccatttgtgctgtagccttaccagaaggtctttagcacgattggcactttgccaggatagagagaactcatcaagggccctgaagcaggtactcagatgagcgatgatattctcgttttcttcagtttggtactgggaaacggcagcgaagagaagtagtagcacggcggaggatgtaattgagactgctttaatgtttatgcggcggagggtatatctggtctcgtacaatacaaggattttggcaatggagatggcggaattaatgcacatttctcgagcgtgagtgaacccaggtcccttcggaggttgtggttgcaggtagccttttgacatccagggtcgatgactgtagatgagattctggtaatattgcatgctttggggtaaattagcttacgttgtttattagaactttgaatggtataatagaaactcactgaagtagcaacacatgtggaagataaggagaactgtgatcgttaaggtcgatctgtaaaactgaaggcaactgagctttccaactgagaagcttggcaacattatttgcattgagctgttgaagcaaggctcttggaatacctgacgttccatacctgtttcgaggccaaagttagctaaagcaactcacttgagcccaactatatgatgtcgagcgacagcggcaaacagggacggaaacctacagaaaatagccgcagggtgccataagttcacatagggagacttcctgttcactgacagcccccacacagtcaaataacccggaatcattgtcaaatgggatgggagatgcgtagggcgtccatttgcaaggttctcgatagtcgacgtcattattgggttttttgactgtaacatcctccatgttggtgtagaaaggtctaccaaggtagaatccgaccaggctggaatttcgaaaagttaatgatatccttagcgtgtacaaaagcagaatgggaactcactggtctaccatatacgcagcccaaaaaacggttcgacgcagctcggcgtctgcagcggtaacagatccacgagcaacataggaagaaaggtcgatatgcaaggcaagatcaaaagcaagccgaagggccattcctagaattgtaagctaagaaaaccaagaaatttcgacagaactgaccactgtagagccatccacgtgtatctgagcctataccgatttcatggctgctcaagatgactagtgcttggactgttgccacgcatggagagtctaattcaatttcaagcagttcttttgcacggtccccgaagaattcaccgagagactttgggaacgtcacaaaggatggatgataacgggtctcaaaagcagcgccgagagaacacctattttctaatgtcatttcacctttccatttggtcggcaaaaaaatgactcacattgcatagcagagtgcctcggaatagaacggggtctcttctttcccatcccacgcagtctttcccttttcgaacaattctcggtcgacgacgtggaacgaaggatcttgccaggcaaaatagagattaagaagatgctcctcgagagataatgggacttgtctatcatattctgcgtcatcgaaatgatcgacgatacgatgtgtctgagtgttgatagatactggagcatcggcaaggttgaaagtcgatgtcgggccatagaagcgagctcttcctccaggaccaaagcgcaatgtgcccatccgatcagaaatctcgtcgataagatcttcaatttcttccgtgctcctggaatcattgtcgaggctgggtgggctttgaatgacggcggactcaaagggctcaggtaccctatccaatggtttccctggcggctgtagtggttctacgccaatgtctccgatgtctggagatgggggcgtaatgcatgtctcaaagtccaaggtccagtcccaattggccaataaattatcagagtgatcatcagttggtggatactgttctgcaatggagatcccagtgtcaaggaccatgggcagtgtcgaaatggcgtgagggtccgaaagcattgtaaaactcgaccgagaattttgcgatgcgttgtccggtgatctcgaggtctgagcccaagtatttagatcattttctacaccaggagctgagaacggcatagaattcggtgcctcagaaggcagatcatcgcttgcagatggggagtttggattgggggatttgctgttagttcgattgtatcttgcggctgaatgaacttcagttaagccaagaacatcaaggactttagccaaagcagtgtccttttcttgtggcatgggcggggcctccaatccactttcgtggatgaagagacagagctgttcaactctgcttgatagaagctctatggcaacgcggagtgggagtcttcacatccataatcagcactattacctagccagcagccttcctttaatgaaatgacttttgatgcgtcacttactttctcttgtctacggcctggtatcgacattcgcggtgcttgttcatgcagctggagcattggggcttaccgccgtcacactttgctgacattagcttcattttgtttcccaccgaggtaattgatagtcaccttgaccttactttcccgacatgacacgcatgccatggaggcatggtgcctcctctttggggggacactgggctttggcatgtttttttctggatgccatgagactatgcgcttgcaatatcctcgtcccttagcaaatagagggcggcttaacctcgggagggatagtgcggggtaatactaaaggggaaatgtttgatccgaactatacgtcgtagcttctcgctgctatttcattggctctaccaaaagggggaccactatcgacccgtgtatttgtatttctggggcctcaagtgggggatactcgtataagtaaaggatgaatgacatcatgcatgatcgacagcctcgttggcgaacgagatgtcgtgcaaatgtcgtttctttttccggggaccaatcgctggtaaaaccggggctggctctaacctaatccggaatagaccgcctctacgggaatcataacccggtgtgggggaccccacgttttctgtaacaccccaggttttcagatgattagtaggattaccgtgtagtcctatcacataatttagatttcattgaatataaatacagatatgaaccgcacacgagtggtccatgctaagatcgtatactggcgatattgcaaccctgctcatcatgtttttccagaatgcacaagggaaatggcttcaatacagaatcacagcagcctgcggtgccggtttcctcctctttggctatgaccagggagtcttcggcgggcttctggacaatgagccgttcctcgagacctttggaaatccgggcgtgaccatccaaggtcaaattgttgcgacttatgacattggctgcataataggcactctggtgacgatgttcgctggagacaaactcggacgaagacggacaattctgatcgggtgctgcatcctgatcgtcggcgctattctccaaactgcatcctattcccttgcgcagatgattgtcggtcgtgtcgttgcgggagttggaaatggaatgaacacaattgctattcctatttggcaatcagaaactgcacgggcagagcaccgtggaaaactcatcgttgcacagttggtaacgaatattttcggcatcgtcatcacaaatgtaagctacttcgttcacagtacaagaccttggagcaatgctgatttttttccctatcgcagtggatgaactacggattcactttcattcctcactctgccgtgagctggcgattccctctgggcttccaatgtttcttcgcgcttgtcactctcgcttttgttattgtcgccccggagtcaccgcgttggctggtcatgaaacaccgtggcagcgaagcccgtgaaatcctagcacggctccttgcaaagccaattgacgaccaggaagtggtggatgagatacaaaatttggaaatagccgtgaaccatgaaaccgaagtccaacaatcgaagcctttgcaggcaatcttcaagcgcaataacaagcaacagacattgcgcaggattcttcttggagctggtactgccttttttcaacaagttggtggaacgaacgtcattgcatactatctaccagtggttctgacccgatcagttgggttggacaacagaatggccctgatcttgtcggccgttgactctatgtcgctaatgttttggggatgtattgcagccctgctcattgaccgcattggccgaaagagattgatgctcttcggtgccgctggtagcagcgtctgctttgcgcttgttgccgttggactgcggtatggtggacccgacaacaagggtatgtctgttctagccgtggtgttcatcttcgtctactacgtcttctacggcatgtcgctcttatcgatcccgtatatctatccggcagagatcaactcccagcaaatgcgcaatattggcacttcatttgcgaccactaccaactggttattcgtttatgttatcgttgttgccaccccaacagccatcgcaaacatccagtggaagtattatatgctttttgccatattcaacttctgtttcctgccaatcatctggcacttctatgttgagaccgccaacctgtctcttgagcagattgacagactctttgagattaaacatgaggctgggaaagcaattagctggtcggaggcaaccatgatagcccgtacagaggtcatttccgatttggcacacaccgaaaaggaaaatcttgatgctgagcactatgagattgcggcttgatcttggaataggtttctttagatgttgtacatgtgtataaatgatgaacagctgtcgggtatctcgaatataattatttataagctttgcggggtaacggctaatccataactcattcccgagggcttttctctgtgaagccgcttgaaaagtctacgtagcaaattcatcttcaaagcagtttgctaatttgagctacttctcaatgagattcttttcttgcgaccagggggcgtcttcgtagaaagaattccactagaccaaaaaaccatgatctctatttatggcctaaaggagggctataattgttctgtttcttgtcaatatgcctatcttgacattggcgtttctgaggtaaccaaaaaagtttagtgacacgataatgcaattgcagtaatagtctcggttatagcaagtcccagttcaactcggattccctttcccggccaagccttgtatccactccaaactacgattgtgtatataaccccgactaagctgttgtcgaagcgactactggaaagcatttctcagattcttcaactcttactactccttcaaatatcccctcgtctcaagatgtcagccccgaagttgcgcgtcggtatcgccggcctcggccgaatgggtaagcattgttccccaatcggatttcgaaaacctccaattgacacataacaggccaacgacatgcattgaactaccacgtttttactcctcgtgccgaggtggtagcagccagctctcctgatctcaatgagcacgtatgggcaaaagaaaacctcacaggagcaaaaatctatacagactactatgaaatgctcgagaaagagaatttggatgctgtagtggttgctggaattactgccgtccacgcagatcacgccattgccgctatcaagaagggattgcatgtcatgtgcgagaagcctttgtctcttgacgtcaagattgtaggtcgttctatataagctccctatatgaagacatatgctaaccgcaacaggctcaatccgttctcgatgcctacaacacatcgctcaagacacaccccaaccagaaagtcatgtgcggtttctcgcgccgctttgatgcttcctaccgtgaagcctatgagagaatgacctcaggccaatacggccgaccagtgatcttcagatcccagactgcagatatgctcgacacaaccgggatgttcgtgcagtacgccaagaccagcggtggaatcttcctcgactgctccatccacgatattgacctgatgttgtggttccttggtgagaccacccatctcaaaagtctgcaagcggttggagtcattgccgtccacactgcattggatgcgagcaaggaccgtgacaatgcggtagctacggtcgagtttgacggtggcaaaattgccacccttttctgttcgcgtatgatggctgctggacaggaagataccaccgaggtcatttgtgagaagggctcattgagagtgaacatgcaaggccggaagaaccaccttgagatccacgatggtcagggagctagacgtgatcttcccaagcattactatgagcgtttcagagaggccttcctcacggaagctaatgagttcactgctagctgcttggataacacgcctcctccagtgtccctctcaagctcggtgaaggcagttgttattggcgcggctttgcagaagagcttggttaccggtgaaaagattttttttgaatctgggaaagaggctagactttagtgtaggaagaagctgtccaaaattcaaataggtattcattcaatagacaagtgcttttccgattctgtacattctggacttgtttgtttgtatatgtctcacttcgcgtcacacatgccaccactacattatctacacacgtacatactgatgccagctctgttttttgtgtgatatttgctcgtctatataccatgtgccaaacttgcttgatatcagtcaatttatggagctccatattctgattcttaagcggagatttgtgtacaataacatacaaacaagacagtcaccgtacagatctcatgaacttatagaccattaattcacttagaagtgccaaagtattgatcaagtctagagatactataagatcaaagggtagatatagtcatggctaataaataatcctatatgttgaacgatagcatcaaaataatacccccccaggtggctgtggccctgtggcgtgcacggggcaccgttatctggggggggggggggggggggggnnnnnnnnnnnnnnnnnnnnnnnnnnnnnnnnnnnnnnnnnnnnnnnnnnnnnnnnnnnnnnncgtgggggggggggggggggggggggggggggggggggggggggaaggatgcagcgtcaagctgccccaacgtctgagccataaaatgctcgtcggtcgaccctccctctcatcaaattggaggttgactttcttttccatctaagacctccccgacaagagggcaatgaatctttctttcttcttccacccatggaattctacttctttttttttcaaattccaaacccatggaagctttgatggcagactaatctgccagcgtgattgcaatgatatctctcttcaacacttattcttcttctgccttcttctatagtgtgctcgctgcctcacggggatttttctttgcatctttcccccgtccacctgtgccgtgagcagacaatctccagtatatcagattcagacaaaggtacggaccctaagcctaatatgtcatcttattagttgactacagcctacgattgaattaagattaatttacttcgacgaaacgagcttctatactccggaacaacgggaaatcaatgttcaagtggtaaatgagaccaatgaagtgatctcgacattgattcagtctgaattcgaccaactgattgatgaaatcgaggttgctgaagaagtcgacatacttgatggaacgcatgacgaccaaatggaagaccaattgatgcccgaggcagaagcaacagaaacagacgaaatccttggcgatcagccagcaacaccagacgaaagcgaaccagacgaaatcctcggagaccagcccattacgccgtcagaaaccattgacgatcaaccacgtgacgacggtctcatggtattcattgacaatttcaacgtcaatggagatgattacatctctctctaaaacgaccattctcacccaatgatgacgacgaagaatcacctgacaagaaacatcggacgaaccttattctcacctatttacgcgccttttcaacggcatgactctctcaaccaaagaagacaccggttgatagtttgccaaaagaaccagacaactggtcagaagcgcaattccatgcccataaagctgaatggcaccatgcaatgcaggttgaatatgacaagctgaatgagatgaatgcttggatgtctgagaaactgatcaaatgagattggcatttagaccaatgttggaccaatgtggaaaaataccccagaatgcctgccctaggcatcaaattcttccaatccgatgggtattcaaatacaaatcagacgaaaacggctttttgacaagtttcgaagcacgcatttgcgttcgtggcaaccttcagatcattgaagacaaagaagaggttagggctgttggagtgtggcagaactaggcacgatgcttcgtaatgcactctcgatgggtcaaatgcgtagtgtttaaacagataaacagctaggcggtctagtgtcaggtcaaagatgagatcaaagtgtatgttctgggatgaaatagtcaatttgtctaactaatattcaatacaatttgggctttcttataggagtcaaacattccagatagctcagcaatttaaagatcagataattcatgactctcttcagatgtaacaaagcaagacgggatggaacaaaggaagcaatcaatggcatcactaaaacaaggaacacatatattctgacacaccccttcagattttgaccttagtcaaaagctgtacacatgggataaaataagaaaggagagagaagggatcaaacattgtcgaattcggttacccgattaggcaattgtctcaaattcagttggttcaagaattcaaggtatttttgagacgaaaggtgttttgtcaatccgtcggcgatcatattgtttatggcaatccattggagatatatatctccatttcttaccttttcacgcagccagtgcttagttattgatgtgcacgtgatgtaatttcgtctgatatgacgaatttgacttcgttatcagatcaatggtctgtttattatcatatgataagatcagatcgtgttcagtgtcaaactcaatggaatggagcaatcgtttcatccaaagtaggtattttgctgcttcagagagtgcaactaattctgcttcggttgtcgatgtggtaacaatccgttgttttctcgctgaccaatcaattggaccactaaaaagggtgaaaatgaagccttgagagctttttcgtccgatgttatcagcaaagcttgcatctgaagctgctcggaacacattgaggatcacatgatccgtcgaattcaattgaatggtatctggtcccatacaggtatgagattgtttgctctgcagcgatcacgtgggcccttctttctggcttagtcaaccattgagaaagcattgatgtgcaaaggcaatgtcgggacgtgggttgatctcgcgggctataggttgatttagggtatttcaagcgataaggaatagcttgaagcaagaagcctgcttctgttttctgtttcctcaccacagaaaatggcgctgaaactcaaatgaaggggcttcctgccaagagctcagtctctccactggagcactctctttatgtgacgacccagggaccggatggttcggtgtctcactggaagtcccatcgacctttcgagttgtaggagatattggaaccgaaccatggagcctgtcattctgtgaacgctttttcttctccgaacccaccatttcaggctcagtgcaagctttctgccacctccggataccgtgagaagtatcaagagggaattgcgaccaagtatcaatcccccccttctcaagtctgggaaatggcacatacgtgccagcagcgtggcctcggctgctctctcggggaggaatcgcagccgatagctgctcatcagagacatgcggaagcaaattcaaaagaatgctctcagtgagctggagtcgattctccagtgcttcggtataccctttctctggtcctcttcgaagctgttcgggccagttgcacggtcggttgttctcaagacattgttcgcaaacgggtttgaggccgctgcacttttgctttctcgagcgacacgagttgcaagcagttgtgatacgtgctggtcttttctcttttgattttgatgccatcttattttcttcttgtggcaggtcaagaggtatgaggggagtggggtacacgcagcggtaaacggcagaccccatcgcctgaaagttctaccgaacgtcccggtttgtcgctacagcggccatccggcgaaaaggcaggatgaactatcagccacctttaatcgccgtgttttatatatagtctggacatccatctgcattcaatttactcattacatcttccccagttccatgcatatttcctctttcaatatggcaccaaagaattcataccgcattgcctctatcccaggcgatggcattggtctcgaggtagtcagtgctacaatccaggtcgtcgagaaactcgcaaagatccttggcacattcaagatcgactttgagcatatcccgtggggaaccgagtactacaagcaaaccggacgatatgtgtctgaagattaccttgacaccatacgccagtacgatgcggtattattcggtgccgttggatcacccggtatgttttctatattgcatagcatcatgccgactaccaagcaaaaatattaacacaaacagacgtgcccgatcacatctcgctctggggcctactcctggccctccgcggcccactccagctatacgccaacgtacgaccagttcgaactttccctggaaccaaatgccctctcaacaccgcaaccgaaggcatcgactggatgctcgtacgggaaaactccgaaggcgagtatgccgggcaaggcggacggtctcacgttggacagcaatgggaagtcgcgacggaagtggcaatattcacgcgcgtgggaatcgagcgaattatgcgattcgcatttgagacagcgcagtcgcggccgcgtaagcttctgaccgttgtcacaaaaagcaactcgatgcgcaacgggatggttctgtgggatgaaattgcggaattggttgcgaaggacttccccgatgtgacctgggataagatgcttgttgatgcgatgactgttcgtatggtggcgaagccgcagtcaatcgatacgattgtcgggacgaacttgcatatggatattttgtctgatcttgctgctgcattggcgggatctatcggtgttgcgccttccagtaacttggatcctacacgcaagaatccgtcgatttttgagcctgtccatggtagtgcttttgatattactgggaaaggggttgcgaatcccgttgctaccttttggtcggcggcggagatgcttgtctggattggtgagaaggatgctgctgcccagctgatgggttgtgtggagcgtgtctgtgctgcagggattctgactcctgatctggggggaacatctaacactcaagggattgtggatgctgtttgcctggagattgagaagttgtgaaagaagatctgagacaattcattgtctttccttcgttcttttcttcttatctttgtttctcaatgtcttcgtctcaggtcatctgaaatatgactttggatgaactaatcagtcggccctgcattgaatatcgatagacacaaaataccaaatgatgaatacagaaactgatttataggacaccttaagtagtgagcaacgcgtcttccagaattgtccagaaatatcagttatctgtcaaatatgtatgaatatcataaagaaaatgtcaaaggcatctcacacaagacggaacagatcagcaggcgatgaactaagaaatccggaaatgtcattatagcaatatgacactgttttcctcatataaaaggaatggtaacaatatcagtatgctgttgtcttaagagtccaacatttaaacgggcttcagcacccttcatagtccttcagaaagcactcagacgggccttcaaacaagccaaagccccccgaatccatctatctcattgatcatcaaaagcaagatttgtcccctccaactacaaacctaccaaccaactaataatatccaagggatgttctaccaaaacggaagattaatccaagagctcgaatacaatccccgaggaacgaactgggtgaacatattcttcaatgcccgcgactacagatgcgatgaccttgccataatgcgcacagtcgtcacttgcatccgcacaagagtcgtcagcatcactggccatgctatgcaccacgatatcccactctgcatctcgatccaagttcccggggaacatggtgacaaggagtcgattcttgctactgcagagctattggcggaatatcttcggggacaggttgctaggggctctgttaatattaatcggtctttgctctttcggaggaggtagtgtttggtctttgggaaaagggaattttgatgcttgaagtggttagagcttgtttggaccggctatttgatagaatgggaagttggatcatcctgaattgtccactatgttgtcaagtatctatactgtagtaattcagctggtaacttgtataggtagtcccggggtcatgcatgcacacgagccttgatatctatatctatagtcaggttaaagcactaaacggtttgggattcagagacattatgcatgatgttaagtggcataccaaagacataaaaatacagacgcacaaagatatcggggaatagatgaaaggcttgaaaatgacattgtatcatgactcctttgttcttgcctagatagactcctgactataaacaataaagaaaagagctactaggcagagaaagtatttaaacacaacaggaagggactcgaaacctccttcttatctttcctcccttccctcttaccacttcacagcaaataaccacaaggtaagcaccccccaaatccaaaacatggccatcctcaattctaacctcacaaagatgcagagcatgttctacttcgacggggagctaatcccagagcccgagtacgatccacgccaggtcagcaactgggtgaacgtcttcatcaaggcgcgggattccaactccgacgacgagactctaatgcgcaccgtcgtcgcctatatccgaacaagcaccgcttcgatttccgtccatgccaagcatcatgactacccactgtgcgtctctatcaaggtgcccggagactaccattccaacaaggcgtctattctcgccgcggcggagctgcaggctgactactattgccaggagattcggaatgggagagtgcgcatcaaccgggctttgcttttccggcgtggggtacaagaccggcgccggggttgatggtgcagatggctggtttatggcccgaatgagaggctatcaatacatgagcgtttgagagaaatacccacagcgtaaacaatatgcattattttggttggtcttctttgatatcattgtagattattttctgttttttctgagttgtgggtgatagcatggtcttagaagcttgggaattgctgtccgatcatatcgaacagagtgtcaaagttagcgccctcgattaaatccaccatgttcaagtcgaaattagatgaccccttgagctgtgccggatctgtgtcctgtaaatccatttgcgttgaagaggatgtatcggtgaggatgccctgctcgttcatttgtgacgggtacattgacgtcgaaggaactactgtaggatcatgtcctctgtgcatggattccacccatgtgttattccgtgactcaagctcggacgcccctgcgaataagccaggctcttcatgcaagtgcgacagacgaccaagtctctgtctgttctcctcccgtgcggttgaatattccacatgtgtgggacttccctcggagcctctcatcacatatgcttgtgattttgctgttttatcggatccgctttctgactgttggatttttgcagccagcactgaaagcgacatgtggcagtgtttggctgtctcccattgagtagacatcaaacgcaagaatcccgaaaattcatcaatttccctatcaagcagttagtacacacacgtagtgatcagttcgaaacctagcagaggaaaaagaaacaccccacgtactgaagaccctttgtcaacacatattggttcagttggcaagctaaagccaacactaacccagacatccacgcagccgacaaaaaaccaggccagaataaagcctggtggctatcaacttgcaacctcagccccgaaaggatagcccgggcagccccgatgcaggtttgcaatccagaacagaattcggcagttgacggatctagggacagcgaaggtcgatggataatcagaatgagatgctgatacagcacagtgaaaaaaggagcaaaatcaaacgcactgtctggcaatacagacctcaccacttgttcagataccactggcttgatttggagattggtgggaaggcaattccaccacttatgcacgtctgtcacgaggaacaacaccgagctgcgacgaacagatcgaaccaatattgatttgtggaagagctccaatgcccgacccgtcagggtccccgagtcaacgtagctagcaagaacactttccttgctgtagtcttctttattgccgtgctgcggcgcagagctaccattcgcagagtggccccggggggaatgcaattctcgggcggcaggcagacatacatcgatatcggaatcttgtataccaagcggcaagcccaaagcctggctcaggtatctatctatcgcataagcacaccaaaagacccgcttccgcaattgtcggtcgtgggtggagagttgcttgtatcgaaatggacaccggtggagacccgcatgaagcatcgagcgtaggatacagcctccgacagtcgatgctggtcgaagtgacatggtcgcaacgagatatacttggatagctagaagcgcttgcagggatacgatatcatgtcgagatgagagagtcccaagcaaagagttgaaactggccggtgattggatcttcgattctgactgtagatctaagtcgggcgctagaaaaatgcctagattgaagacacattggaaaatgattgtccagcacgtactccgatggtctgcacagggttcctgcgtgtgctgagcttgattcccattggagtaaacgttctccattgcctgcaggaaggtaggaccatgcagaaacgggaacagtgggtgccagactttgaaatacatcatcatcaggcccctagccacatctgggggtggtagattccccagagatgccgtcaatgatcggtcgtaggtccattttggggaagattcgatcacccgcaaggacgaagcagtgtctctgacatatgaagtgcgctggcgcttgtcacgaggtgagccttcggcgcctacgagcgtttcctctgctgtggggagattggattcaggtgaccccgggccatctaagccgttgaatgcacgttttactgtcttgatgaaatagacgccgcttgagctaccgacgaactggctatcctcattcgagtgtgccgtcaaagaaccaatttcagatgtctcgggtacaaattccgatgccattgtgcatataccatctcgtgagtatgagatgttctctttaaagctcgatgtgtttcgacagaatcatcacggtcccggagtgatggagacatgctgagtcatcgtacgagacggacaataactagcggtctcgggaaataaagaaaacatccgtctacggtcgaaaggaacttggtgaagcaaaataagtcactgccatcccattgattgtctggcgctgctctccggaatccgataacaagggagaccaggcttttccgtgaggaatttaaatctatctgacagaacacaggcggtagggagaagtgcggaaagatgataacctcacaaatcctccggaaaaagggaaaaagaaaaaaaaaaaaaaaaaaaaacaaaaaagaccttggtgaagcaaaataagtcactgccatcccattgattgtctggcgctgctctccggaatccgataacaagggagaccaggcttttccgtgaggaatttaaatctatctgacagaacacaggcggtagggagaagtgcggaaagatgataacctcacaaatcctccggaaaaagggaaaaaaaaaaaaaaaaaaaaaaaaaacataaacgacgacggcgaaaaggttgactgtcaaaggaaccacacccagcgcctagaataaaagacttttaccaatgccaaccaggagacaactcgatatagcccagtccaagtggaaggtaagggaaatagcgcatactagggaaaccggagaagagagaagaaaaaaatccgaatgtcataccgcattcactaaacaccaggaaggtgactgcctaagaacaaacttttcgaaccgagggatatcaggatcagagatggggagatgtaggggtagaaagggtaaaagatgggaacaaataatgataagagaaatgaaaagtcgtcaaaaacgtgcgtccaagatttccgagaagacaaagagtgaacacatcaattaagacttgttctcctcaacaggggcctccttggcggcttcctggggcttgggttcggtggtctcgccatcacccttgttcttcatgtactcatcatagacgttaagggcctcatcgaccttgccgcggagagcctcctcatcatcgagcctggaagaatgttagtaaatcttgtcacacataactcaaaaaaatgggcagtgtaacttacaggccaagcaactcagcgttatccatctcaagaagcataccagtgatcttgccagcaagctcgggctgctgagcctggatcttggggtaaagagcctcgccgagcatctgcttctgctgagcggggggagcggtgagaagagcctggttggcagaggcgggctcgccaccagcgggctgaccaccaggggcgggctggccgcgaccaccaccacgacccatctgaggaccaccacggccgaaaccggggccaccacgcatgttcatgggcataccgggaacaccacggccaccgccgccacgtccgaaagcctggggcatagggtagcccatgccgttaggaatgccaccaggggcctgcatgcccataggcataccctggaagttgggaggaagctgttggttggggggcataccacgaccaccttgggggaagggaccggggtactggggacgtccagcgggcatgttaggcatgggcataccgccctggggggcgaatggcataccaccacgctgtccagggggcatgaagccctgctggccagcaccgtagaagacggcgggctgcatgaactagtcaagttagtaattgagcgggctgaacaggaaagttgcaacttacaggctggggcataccggcagcggctgcggcctgctgctggcggatagtgttgcgagcctggatgctagcctcgagctggctgcggcggacatccttgcgctgagcgagagcaacgtagaggggcttggcgttgaccatacgctggttcatctcggtgacagccttggaagcctcatcggggctgctgaagcagacgaaaccgaagcccttgctcttaccgaaggccttcttctctgtcttcttctcctcggtgtcctcgccctcctcctcggtcttcttctcctcggtaggctcctcagtcttcgcctcggtgctctcctcggtcttcacctccttctcctcggagtccttggtctccttgtcggcctccttctcctcggcctcgggggagggagaacgttcggcggcatcacgcataaccttggcggaagtgatagtaccgtaaggagtgaagaggtcacggagcttctcatcatcaatgtcgtcggtcaagttcttaacgtagaggttgacaccctggtacttggaggccttctccatgcgggcagcctcgtactgcttgcgcagctcctcctcacgctcgtgcttcttctgggcacggccaacgtaaagcttctgagtcttgacgtccttctcgttcatctcagccacagcggcctcggcgctctcgtggttggcgtagttaacaaagccgaaaccgcggctcttgccatcctggtcgtggctgagggtggcggaggtgatctcaccaaaggcctcgaacatgacgcggaactcgtcgtcggtaatctcgagatcgatgttcttgatgtagatgttggtgaagttggccttcatctcctcgaacttgctttggcggtccttcttggagatgtggtgtccgacgaagaccttcttgtcattcagcagcataccgttaacgtgcttgatggcgttgttggcggcttcggcggtctcgtagtggacgaaaccgtagcccttggagttggcgaactcatcctgggcgaccttgcagctgagaatgttgccgaaggcagcgaaggtgtcgtggagagccttgttgtcaatggcgttgtcaaggttcttgatgaacacgttgccctggccagtcttgcgcagagcggggtcacgctgggaccacatgatgcggcaaggctttcccttgatgagagtgtagttcagatcctcaagagcacgctcgccgtcagcggtgttgttgtagttgacgtaggcgtagcccaaggaccggcgggtgacggcatcacggcagacacggatagaggcgacctggccgatggaagagaatagctcgtagagcatagcctcagtcacggaggggtcaagctcgccgacgtagagggaagccgagtggggctggttgttggcagcatcaccggcggcctcggaagtggcctcgacgggggcgccattggcctcaggggtagcggcgacaacgttgtcagtgacaggagcggtggcgggggcttcagcagacatgatggcggctgttttcactaagaaaaggaaaaagttttagcatgtgcatgccgagcctatcgcagagagggggagggggaatcaaggaggcatatgagataaggttacacggcagttgatgcagtctatttagcaagcaaccaaggggcaatgagaaaaaaacgagggggtgaatcaatgaaaagggaggggcgccatacagcgaagtatccacgaaacaaagagttcagagaaatttcacttgagcagagagcactagtagcggattagcgggggaggagattcgaagtgtattgcatgcgcgatcgaaagagaagaagcagagatgacacggttttcaaccgagtaaaagagtggacaagaaccaaagtgactaaccaggtgaaaatgaagacgatggaggcgttgaaagaaaatcttccacacaacacaccgcacaatcaggaatgagataagataactggaaaaagtctttttctgggtttttcgtgtttttttgagattttgtatctttcgatttaaggattcgaaaagaaaaggaagacttttccctaaagaaagagagagcaacagagatggagggggaggttgtaagaaggaaagaaaaaaagttgagccgttcaaaagcaattggttctggaaaactcagaggctgcacgagatggggacactagtcctgtttgggaaaaggttgccgctttaagggcttattaagtataacctcggatggatattgcaagataaaagaaagaatatggccatgctatgcatgcaaaaattaatcatagacacgcggtctacccaggaaatgtacaggaaataatgactgaacaccccccttcaactcagatcaaacccagctcccgaattcacagcatataaaagcttgctcttcaatgtctctgcatcagagtaccgtggcagtttgagaagattcacacacgtactggtactcggcaatctttcctggtcctcactggagtctctaatgctaaagttgggacgaaggtggctgaatcccaacaacggagctcgaggggtagacgtcacgaaccggatgaccctttgtcgctcctcgttggtcaactcatgcataacctgccagaacagtgcaatggtcgggtgttctagatggtcatcaccaatcacatacacacctccgtagagggtattccgtcgcaagtcctccacatcaatatcagctttgtctccgctcactaaagtttgcaactcggattgattgaacatggatagccaggcgggttgaatgatctggcccagaccttgcaaaaaggcgtttgtctgtagagcaggttgcaactgtagacgataacgagccacgtaggaaatgtagaccaatctatttttgttcgtcacagcggtctgtgagccatttggtttcagttctgcggtgacagtgcggttgcctccactgggcatccgaattatactgttaatggtgaagtcgagaccgaagtcttccacgtttccgggataattcttcagttgtaactggtgaaacagattggtcagctgcaggttcaaaaaacacaatcccgaccttgccagacgataccacttaccaagccttggtataacccctcatcaaggtccttcagatcgttcaagttggcacgataggaagattccttcactgcagacctagagcctcctgtcaaggcccacttcaagagaaagaatggggcaaaattgacatcgaccaagatcccctcgtaaagacactttccaataatccggccgaggaattcatatcgtcgaagaagaccgcgcacgtcatcctgccattctgggcttgaacttgtgagcccagcctcgccgagaactgttttgagttgggcaaccgctgtcgggctgggatacagcagatggtgatcattttccgcaaacatgctttcgtggtcatcagttttgaaagcttgggtagtgatactggttaggaactccttcgtcacaccgccaccatcgatgccggcttccattgctccaaactggtcgataaaactgatctggattggctctttgagaccgtcacccaagccatagtattgagagaatgcatcttcaaatacactctcacgccggatgtcagcatggtgtcgagccaagatatccgccgcaccctcaggaggtccatttatcatagcgttttgggccacagacaaacgccaggactcagcatccacgaagcctttccggcgacgctgttgatccctaaatatgaattgacggaagatctgcactctcgtggcaaatggtatgaagaaaggcatatttcgaagtatttctagccgtggcgcaatggcggctagagcattattatgagcttgtcttctttggctatttcgcatggcttggagatgaattagtcgtcgcgcatggctattgccgacaaggtgaggagactctgggtattcctcatcaagaagatcaggctcagaatcttcatcttcgtcctggaattcatggcgtttctcctcttctgccacaacagctggaataaagccttccatgtcgaatcgatctgtcatcaaccaatgattttgtggaaggaatttgcgtcgagaactagaagcgtgtcagctagtgtgactaaatcatagcaaatggaacgtttcaactcactctcgctcatgtagcattctgagcaaacctgtaaccaagcctttgaagtagtcaagtgggatacctgtcacaccaggaagatcattgatttccttcttggcctccacctcagaacgctctatcgtcccagaaacctgagccgtgttgttgaaataacttctaagatccacagcggatgatggaacgggccctttcttggtcaagtcggcaacattccagtagagggtgaaggcgaggtttttgagaaagacggtcatatccttaatgtctttaagtggcagtgcgctctctttcgtccacgaagacaagacatttggtgaagctgtaaacggtgacgcgcttgagaagaactcttcgtcatccatgactttcaagaggaacgtgtaaagctcaaaaaagagcagaataatcgtccactcctgttcttgatcctctctatccccatcttgaggcagttgcagtaatggaagaacttgggtcgagtccttgctgattatgtcaaagatccggctggattttgatgcctgccagaaatatttgatcgccggtattttcacacctggctggccagaagtgggacctgccgaaggcgccgagcccaggtacaaccacattcgaatgtcgtctccacggcgagggaacaccctcagcaaattcagggcataggtagcaagaatcttggcttctctcgaagcgttgggttcgttgtttggtaagtctgtgtaagaaagttgggacttttcgatgcgagaaagtagccccgtaatgctactttggttgaccaagctactgacttgatctccgatgaactgatccaaataaggacccctgattggatccgagccgttctcgtccgcctccaagcaccgtgtcagatagatagatgttgagttgagcaacccagagaccacattcaggaattcgagatcaggtgtttgcaagttggcctgccctggaagagcatatcggtgaaagaaaatcaagtacgcaagcagccaaaggcgactctcgataccctcgacatcgtcggcagaaaggcgttctttggtcaaagaaatacatgattcgattgcaggtgccagtaatttgtagttgatttgatgcgccagtccattaagctcaccgagataagtgggcaggttcggaatagtgagatacgacatagcaagagcttcatatgctgtcatcgtttctggggttattggtctcagaagagccaggacagcattcgtgacatgctcgggtgacagggtaccttccaagatcttaatgttctttgtcaagaaggccatcgtttgatagtattgtttggcaattgttgccatcctccttggtatcaagtcaatgaggaagactatcgtccgaaggaggggcaggactgctgcttcatgagtcgggctgtcttttgctgagccgagggcatagagaatagcgactgccagccgtttcaacagctcggtccagtcattttccgtagcgatcgtggggagagcatggaaggtctgctcaaagacattgcagaagtatactagacgtagaacatcttccttcttccttaccaatcccacaaactgaaccagaagcctgagctggtctaagcattgcttcgctgtgggatatggcggtgcggaaagacgttctagacactccagacgctcaagctccgtcgttgggccccggtcatcgtcgaatcccagggcactaataaccctttcccactcaaaattatcccattcggacttccagcccttatatgttgctttcctgctctgatgaccccgccaaactcgctgaacggtgcgagatgcggtctgtcgatctctctcatgttgtctcagggctcgctctcgctgggcaatggcgactgcgctctcggggttcacagcatgaggggtatgtctagtcggcgagtttccggggaatgcggcgaagggattagtggctcggccactgaggttcacttgccgtgggcgacgagagttgcccgtgaaggattgaaacatggttgcagcaggagctgcctgatgggaggatggccagcaggctagataaaacgaaccctctaaacgcagagaagcaaatcaactcaagcccgcatcaccgtgagggaaagacgaaaggtgaagaactatgacatcgccgtcgccgggtgccgatacgggagagcatggcgggcttatcggacttgtcgagcacagaccacatctccatgagacctgagcactatgtacatattgccactggaacattctggttttaagctgacataggtcagagtgaaccatataagacatacgaaaaatcctttgtagagaaaaacaaacaatgtcaaaagaggcgaaagattacttgaagtttaacctgatattcatagaatttgtcaaaatactacacaattgctcctgtctcggtgccaaatggtacacgtccaccgatgcatcgggctcctccgtggtccaaatcaagttgatgttgtagagactataatacatgggatatattcaatcaaccagcggagagaaggttgatcaatgaaattgttgaatgatgcccggaggtggttgttgtggatggtatgccgggccgctggcataaaaattagagcactctcaagcgtctagattgctgcgcactcacatcatttgaaaacacgtagaaaatccccgctatgcggtttcagtcttttggaatttctagaaaagggtcttcgagggattgggcttggcagtctcgggcgtttgggccaggttttggtcttcaatctgcttagtctgcttaggctgcggcgttggcttggtttcaagcttcacagtcttttcgatgtggggttgtgctagtcgggcctcttcggcttcaacggtctcagcccacttctccaggtagtccttgccctcaaatcctctgatcacagtaatctttcggccatttctctcgatatcttggacgtagttcgacggtgtcttgcgcatgtgttttgtgatgaagggggcgagctatcgccatgttagcagatccaacatttcagtcaactagtaccaaatggttctcaatgctcaccatgaatggctctttcgcagtctcggcgtaatgtgccctgccaggaatttcaagcttttccgcaggcatataaacacggtgctttgtcatatcgggcctgtatgtgcctctcttgtcaaaatgacccatagagccggtccggtttcccttgtagtagccgccattgacctgcttcgtagtcaagcgcaaacgcaccatcattggctgcgtgggcttgaacattatggcgacagttctatggccttgaagttggaacagaagggggatagagcgagtcgagttgtcccggaggaagatgggagacaaaactcgacgaatgaacgggtcgcgctaatctccgcgccgagaactttttttcccggcagaaaaaaagttcaacaccatctacacccctcttgaaagctgaaaacagccatcagatcatttagtactattttagtactgatctgaagcttctttcttagtcgtgaattcgatttcttaactcatacgccagtatgcctcgcagccagactcagaagcagggtccgaaagaccgctcgacgcagaaatcagcaccgaagcggaaaagcactcggtcgctaaatgcactgtctattgcagagaaaacaattcacactagattgggtgttaaacgcagtcgtcttggagcctacgatgatggtaccttcaaccgcaggagaaacaccggtggcgatgacgacgacaacgacgaggaggataccgccgcccaatacaaacgccgcagaaccgaggacaccggaagccttgacggtggcagtgacagtgaaggacacgaatggactctcggacaagtaaatagcgataacgacagcgaattggacagcgacgaagctctcggtgagagcgacgaagagcgattcgagggcttcactttccgcgcatccaagtctaaatttcacccgaaaaaagcgccacccaagccaaagaagcctacggagatcaacttgtctgaagatgtcgacgagtcggatgaggaatctgacggtgacgactacgacgaggacgatgatctgggagaagacgccgttgaccttgctacagcctgggatatgaatgcagcggccgaggaggaggaagcccaggaagcagctgcgaaatccaagcgggctgcgaagtatgatagcgacgaggattccgggtcagagggggacagtgaaagcgatgacagtgacgatgggctttctatctcggacgacgatgcagatgtggatccgcacggactttcaaaattacaagactttgtccagtccatggagaccgagaaacctacgaaacgtacccaaaaatcacaggaacagggcaagccctcggaatacggcttgacgaccgccaacaaattgactgtcgccgatctactgccctcaatcacagactctcgcctcaagaactcgctcaaacatatcgactctgttgtccaggcatcaaaatcgggcattccgggcaagctagatgctcctctagcgaaacgccaacaggaccgacttgaccgagctgctgcctatgagaagagcaaggagactttgaaccgatggctcgaaaccgtcaaagccaaccgcagagccgaacatctttctttcccgctacgtgatcctgatgctgagcagactcaccgcttagaagctgccaagccccagacagacctcgaaaacgtcatccagaacatccttgtggagagtgggctggctgaggctgaaggcaaatcagctgaggaccagattcagagtttcgaggaattacaggcccgcaatcttcctattgaggagatccaggctcggcgcgcagaactccgcaagcgacgtgacctgcttttccgagaggaagtacgcgccaagcgcatcaagaagatcaagagcaagtcttatcgccgtgttcaccggaaagagcgcgaaaagatagagcaacaagagcacaatgcactcttggaagccggcgtagatatggacgacatggaccaggagaagaacgagcgtatgagagccgaggctcgtatgggctccaagcatcgtgaaagcaaatgggccaagggtttgaaacagacgggtcgcactgcctgggacgaagaggcccgcaacagtgcagccgacttggcccaaagagaagaggagctacggaagagaatcgaaggtaagcgtgtttctaatggagacgatgactacttgggctcttcaagctccgagtcagaagatgaggacccttggaacgaggaggcttccgatgtggaaagacagaagatccaaaagaagctcaaggccctcgagggcagtgatgatgctggtgatggcatgaaggggcgccatgccgaccttttcgaaatgaaattcatgaaaaatgccgatgccgcccgcaaagaacagaatgatgcggagcttcgccaactcaatcgtgaactccgcggagaggagtctgcgtctgaggcagagtctgaggtcggtcgacgaaagttcggtcaatcaaagaagaccgaccccaaacctcgcgcaaagcagttgcccaagaatgagtttgaggagaagctagattcagatgatgaagctgcacaggccgcaggagcagacgacgatgttgacattgttatgaacggcaccaccaagcacaagtcaggagcttctggcaacaagaaggtttcacaatcctcacgacactctcccgatcggcaaaaggatacgccagtagaggaggagaacccttggctgattcagaccgaacggaccaaccgtcgccgaaccggcccagatgcccaagagagcattgacatttcacttgatgctacccagcccgaagttattccagtggagcaacagagcaagaagcaaaagaaaaccaaggcagccctcgcgaaacaacaattcgatgagaatgacagcgatgatgaggagaaggtgcccgtcttgcttaagaaccacgacctcgtgaagagagcttttgccggcgatgaagttgtccaggagttcgaacaagacaagatggacaccattaaagatgaaggtgaccaggtggtggacaatacacttctgggctggggcagctgggccggcgaaggcgtcagcaagagacaacaaaggaagcagaagcgagacctgactactgtggccggtgtgaagcctcagcagcgcaaggatgccaagcttgatcgggtcattatcaaccagaagcgagtccagaaggtaagccaagttgtcttcctatacgaagacggacaactcactgactttttactctagaacaagaagtacatggcaagccaattgccgcatgagttcgagaccaagcagcaatacgaacggtccctgcggctgcctttaggccccgaatggtctacgaaagaaaccttccagagtggcaccaagcctcgtgtcatgatcaagcagggcgtcatcaagcccatgtcaaagccgatgcaatgaatgtaaatatctcacttcacatatgccatgtccaatgttagcacctaatgcgacccatcttgcggcgccttttgaatcaaaagcatttctattcttgctgtactccattccacgtgcccaagtgcacattatagttatatagttcgaatggttcgtacttcatatcatttcacaacaatgtttccactaggcctagtgtcctgactcaggatagtaactattttatatctggacaatgtaggtggcatacgtgcctctctcgaccttgggattgtcaacttaagaccttggataaaccattagaacatgtcccatgattctataagaagtaactaaaaagccatccaaggattgtctggtgattcatattgagtcatccctgagttcttaacaatttgaatctgaatatattcatgctttttcttccttttcaatcctgtcgctctactccacatgggcgatcccttggcaagtgctgcctggagttgacatcttcaaatatttgactattcacgtctatctcccaggtatccccaattatctggtaacagtactatatacataatccagtaagtggatggtcgttgcagtgaatcccgcacacattcttgggggtggggaacgcacgcggactcgacgtgttgcctgttgcgccctacattgctgagccagacatgatacccaactcatgtcattccccttggctgaaatatgtactgtacagtactaacatctgtgaagatcgacagtctgtggaatctgtctgcagaccattcacaacaaaccagcccgtgtgttgtcccaatttgggtgtttgagctccgagggggtttgattctgttggaatttatagcacatacttgtaagattgcctctctttgaatttatttgtctccttttcaagcttcacttgccttttggacccctccgaaggcgtctaccctcaagtgattcatatccgatttggatcgaattgaggaatagcacaaaggcttcatacttcctacaggctccgcgtgtttaatgccggtgacgagatctggctttgcatcatggactcacgcttgaaatggaaggctacagccgtgctgacttggcttttagctacagaaaaagcctactgtctcccacacgtgggaaatgaggtagaagctactctgcaaaacacagctaccgaacctgcacgtgcctttgagactcagtatccaccttcaaacagtgaagacaggctgcttattcccgagtcccaccctgtacgtctcagagaaatgtgctgcatagtatatggtatggtattgacattttggactaggtgtatcgagtagctttggaacaggacggtcattcatcgcagcagccttttccacagtttgacattatccgatttgttgacggcttggaagatttgttgggctcaggtggtaatactcctgcaccaacactgactgcgacaggacagtctactggtacaggaaaatcgcatcctattcaagctacgacttcagcaaaacagcctgaaaacccagcgccaattcatacagctggatctgtgacctactcaccgcaggctgggccaagtactactgtggcacatggtatgattgaccatgaattatagcaacttcaaattctaatgcttagtagagcccgttcacatactttcttcatcctcggttacatcaaaaaccatgcctagccaagatatcttccagccggttgcgactggtcctgtccctgctaatatcaagtcccgagatgatcaccctgtgcagaaccagcacgtaagattatcccaaatgtgagcacgaatcaaacattctaatgttgtggtataggccaatactaccaaccctattgcgacgaataagttctacgcaggccttttcttgggctctcagaccaatgctaccttcactcaaccctactctctggcatggtccaagggaggtggctccctgaagagttggggtatggctgtctcccatgtccagcctcatatgcttgcatacggaccaccgaacagcaagatccccggaaacccagtacaatactacatcaacccaatcggccttcaatctctgatcttctctgcaaccgagcttaaccagtcttccatcatgaacgtcaatcagccaaaggctttctcggcccacgctgtgatcaagccctctgaaggctcggctaagcagattgtcttccccgttgtgcaaggcatgggctacgcaacagctgtgtacagtgatctgcagccggtgattgaaagtggcgttttcttccgtaaggtcgtcagcgctggttcgcctaggtccggcatcttcaagtaccaggtttacctcgaggatgacatgacctggcttctctatgccactccggctgatggcaaggatccggagttcaagctagtctcaaattcccgtcttcgcgggccccagggcttttctggtactattcaagttgccaagaaccccgcgggcaagtctggcgagaaattctatgataactcgtctggtgtatacccagtggcaggaaaaatctctggttctgtcacagatgatgtaggcacctacacgctctcttggaagaaggccggaaaggatgtcaccggcactcctctgatcatgttcgccctaccccatcacgtccaatccttcgatggtgccaccaagagccgtatcactgatatcaaccttcgcaccacaacaaagggcaactccactgcagtcattggagaaagctggactatggtcgaacaaagcctccccattgatattggattcgctccgtggtcaaccacccagggcagttctaacgagctctcagcctcagctcagcatgccattctccaggctgctccccaggagctcaagcagaacatttcaggccagacggaccttaacagcatgtactacagcggcaaggcgttgagcaagttcgcaacgctagtgtatactgtcaaccagcttggcaacagttctgatctagcaacagatgccttccaaaagctaaagaagtctttcgatctattcgtgcaaaacaagcagcaatacccgctcgcctacgattccgtctggaagggcgttgtctcgaccgccggctacaatggcgacctcaaccaggatttcggaaacaccgcatacaacgatcaccatttccactacggctacttcatccaagctgccgccatcattggctctcttgatcccagctggctagccgcgaacaaggagtgggtcaacatgcttgttcgtgatgctggtaactctgttccaaatgatccttacttcccattctcgcgctcgtttgattggtataacggtcactcatgggcgaagggtttgttcgagtctttcgatggcaaggatcaagaatctacctcggaagataccatgttcgcgtatgcgatcaagatgtgggggcagacgaccggcgatgctagcatggaagctcgtggcaatattatgctgagcatcctgggtcggtctctcaataattacttcctgatggaggatgacaatgtcaaccagcctgcgaacttcactgcgaacagggtaactggaattgtaagtaccaccattctctttccatgtctagcccaaactcgacattaacagaccaaaacaaacagctattcgagaataaggttgatcacaccacctatttcggtgccaacctcgaatacgtccaagggtatgtataccaccgtcccgctgttttttttcactccgaactattgctcacaagtattagtattcacatgctaccgctcatgccgcacagtcccttcacacgccgaaaggagtttgtgcgccaggagtggcaggcaatgttcgctgaaaacgcctctactccggcctccaaggttgagggcggatggaagggtgtgctctacgccaacctggccctcatcgatcccaaatcgtcgtgggacttctttgcccagtcgaatttcgactacagctggattgatggtggtgctacgcgtacttggtacctggcatttattgctggtgagtctcttgaatggagtatgatgtcttttcatactaacgaaacatattaggtctggggggtgctccttaaggtggtttaaggcttatttcttggtgatatggagttgggtaatgacttcttctctttatgcttattttttctggccttatgatttgcttttctctacttgcttcttgttttcggacggtccttactggtggctcggagttttcttcgattcttgtgctgtacttcgtatatatagaacgaataagaattatagaatatcatttctagctcgatattagcttgttcagttaatagacatctatgcgcctttatcttatttcttggtaaatatatatatccgtggatacaacctagtctcttatttctcccgttattaagattcctctacaaccataaagttatacttcacatagaacattttggcccttggtggtatacatgacctattatcggttcagtagtccatccatagttcccatcgccataccatgtccaggaaccgtcagaatatatcgcaaatatactaacacagtaaactacctgaatctatgccccagcaacagggagctctaaatccactacccaaggcgcattcctcgcctcatacgcgaccgtcataatactcccattaacaaaaagcgtctcctccccaacccgcagcggccgatccgccccagcactaacatcacagaacgctccgcgattctctaacatctcctccatatccgtcgccacatcttcaagtctaacaccaccatctccatctccacccgccttatcatcccacactccgcgctgtgcaccccacccttcatggatatgaccgaagagatgcagtcgtggccttgcgcgccgcgccgcgcggaggagatgctcacatccaacgctcaaatcaggagggacctgatccaggaccccggcgggcgggccgtgggttagtaggatgtcgatggccgggtaatccgggattggattttgaggctgtgggagtgcggcgggggcggggttgtagcggtcttggtcgcgagggtatgcgaaggcccagttgtagaattctggttggtagggggaagcgtaaagagtgaattttgcgcctgttgatagggtgaaggagtggattccttcttcgaggtagattattcctgcgtttcgggcagattcgcttgtccagagggcttttatagagcgggcgtaggttttgagagaatccgtgtttggggttttggctgaggaagtgcgtagggtggtttggaggttgtcgtctgatagcaggatggattcttcgcctagttgctccgggcgttgatggcgggtgtagccgaaggttgtgaagtattcttcgtccagagttatatcgtggttgcctgctattacgagcttgagctcggcgtcggcgtcgatgagcatggcgatcattgcttcgtgctcgacgcggtaccccacctttgtgaggtcgccggcgtggaggaggatgtttgctttcgggagtggatagcggtaggcataatcggttctttgaggtgggtgtggtgtgcttgtatgagtgtctgatatcatacagatgcgagtcttgatggtcgccatgttggttgattgagggaaggttgggctgtgggggagatatggataagcatcaagctcgggccctagtagcgcccagagcctccaagtacccggctgtccaacacccctactgggaactgctcattgataagttctataaaagatacattggaacatgctcttctgcataagtctttctacgaattgtattacttgtatactacgcaattaagaatgcaataatcacctaaagaagagatgaaactaggaaataattcccatggatttgacggctcagagctctacagacaaattgcatcctgtggatgctctgatcatgacatagctgaaactccgatccacccgttgcaacaaccgaatattttattttttcgtttacttgcggatagccttctggtagaaagcaagctcctcaccctccaaaatgtaaccgtcgcagcggccggactggccggggcgcgaggcaacaacggcgaacagacgaccggactcgaactggcgctcgatagcagactcggtcttaccggagtcagcgaagcgggcagcctgcttcttggcgacggaggcggacttcttctcctcctcagtagcatcagccttctgctggcgtctacggccgatgggctggccgtagtgggcctcgtaccactgacggaagggggcagcgtcaatctggacaacggccgacttggtcagggtgtttgtgcggaccagctcgttgttggaggggtggaaggacactccaatgatacgggtcttgcgggagacaccctcggagccccacgagaagttaccagactcgagacggagaccacggaacttctggttgccaccacgggtgcggacaaggtggatgcgcttggtgccaatacgggtgttggcgggctgacgacccttctcgaaagctctgtaggacaaagataggtaagaatctgcaagtggtatatcgaatccttcccctctcctttcaaatgaaagaaacgttcgacatcatgctggattgattgaatcgtacctcttcttgcggtagaaagcgcgcttggcaccggtggcgctgcgcttgtggcgagaatcccgagaaatacccatgtttgcgattgatggaggggtctaagtcgacagacacaagttagatattgttgattgtggaccttcaacaagttttctttttttctttctttcaatccttctgtttcgtcgcgagcgccgtgcaagatcaatcttcgaatatggaacagttgggcgacagtgacggtggagtggttggatgaccgttgaaagcgagacagaatcgaaagttgatgttgagggaattgaataccgatgatcgaaattgatgggcgcagcgagcgaaacagaatttgtcgaaagaaaacttgcaggagttgagatagcccggtaactcacctctaaatgtgcagcccttcaccagaaacacagattagttgtcgtagggttgtcgtgggagtttgaggtcgtggagtcgctgaatttcgcagggcgcactgtgtcgctcgcttgtgtagtgccctaaccgacactaggccgcatttggattagtggccccagtcactggatcggtcaggtgataaccagatggctagtggctgactcatcgtaaagtcacgtgctggtcactacattatcatgatctggtcgtacacgatctggacattcgagccatttacattacaacgatgtacaacattgaaccccaattgcgtctatttgcagttatactcacaactctgaaatcaatacaaatacaaatgatcggctttcccagctagtaattgcacctatcaccattgactacctatgctaccctctactggctcttgccgttcttcttcgccttctgctccttcacaaacttcttaatgcgcgagaacgaaccgtaaccctcaacaaaacacgacgcaacccacttccaccacaaacccgacataacaggcacattcaggggctttagttgagtcacaactagcaacacggtctcaatgatatgaatagccacgacatacggctggagaatgcagacgaggcgcggaaaccagggcacacgctggagacccaaatactcgtagaattccgagccaggctgcagattgctgcgttgaaagcaggtgatgtagaacagaaaacacagcacaaagatcacagcctggatgccgcgcggggcacggtactcagtgagtgtgatctcgctgcggcccagacgctttaggctctccttgtgcatagcaaccattcggccgcgtgcctccgagtagtccttcattgccggttcgatggggacgctgtagcgggtaccgtgagcggtgatgatcaggtaggaggtgctgatttcttctaattgggcgtttttggcttgggcggatgtgataccgcagtaggcttgtaggaatagtacgagggaatcttggtggtcggcgttcatgtgcttgatgatgaagtctttggatgacatggcggcggttgtagtgggagtgtaaagtgccaattgggctggattcgaaagaattgaaacagttgcgatttgaaccgagtaccacgtatgatatatggggagttggtaacacaacgggttagtagaaataagtgccaaggcccgggcctcggcttcacagtttccgctatgcctgacactttacagaagtttacactcaccacacgcctactacaacactgctgcacttttaagaaagatgaattcaactccattcaaatgattgtccaacaaatatacatagcagtatacgctccggtatattgcatccccttggccctgcacgccaggaaaatcattgtaaaaaagaaaagaacaagatcctgaacagacaaacggaaaggtattacatcaaaacatggctctatggaaagcagcatccaatcaattgaagcattgaaaaaggatcactcgtgacgacgttggatcttcgtgataggattggcaatggaacggggatgggtggtcaagccctgttgttgatataaaacgcgatcaactcctaattcggtccttgagcagacattctttgaaggggtttggggagaggaatgcaagcctcggttattacttacatgagagctaaagtaagatctccatgaatgcgtgccttcagctcgacctcgatttccagattcagttctaatctcagcttcatgccttcctcgtccagcattgatttctcctccttatgaaggacgtccatgccaccagagggcttgaagtccgagttctcattcgagtacggctgcatggcttcctcgtcgtcggattcgtactcgtctgaatcatattcagattcgtccgtgtattcgtcatcttgttgaacgggttgttttttcttctgcagctgtttgttcttctgtgtcttggtttgtggtacttcttcatcatattcctcgtcggtgtagtcgtcggcgctgtcatagtcttcgccgtcggagaggtcctcttggacggggaacttcttgggctgctctttggttttttcaagggtagccataatggatgtgatgggactagagtatagaggatagaggtaggaagaagacggtgtcaaaaaggaaataaaaaaagataaaagcagaagagtatcttaataacattgtctatatgatgtatcattcaagacggggaaacggcgcacagacatcatatcaaagtgcggaacatgacgttggaggctttgctttccaacttctctccaacttctctccaactcgccaaatccccagcctgcactggcttctcgctaggcctgaccgtggtaaaggccgtgtccatactgaaaactgcaggataaatctccagaatctgccaagttgccaacaaaatgtgcgtatcctcgtgtccgatccgtggaaacaacgacagactcgtggcgtgaaccaatggaaaagaaaagcaactaggaacaagtaaatcacttgtcatcgggcggtttgattggctggctccatcctggcaatctataactggcaatttgccgtgaaggctttgacgtcgagtggcgtcatatcattttgcgttacgtctgtttaatctattagtgtggggaacatcaatgcaccaacttcagcgcgatctaggctgattggcgcatgaaactcgctgaccactatatttatccgatgcacactttatatacccagttgctccatatgcgctccacatcgtgatccttgtcccggaacgtcatctatgcagtacctggggagtcccagcccgatgtctggcaccgatggacccaggaaccacggcattgttcccagctgacgtcggaggcggttaggttctgtttacgtccggttttatccaagccctgtgactctgatgatataaacggctgtgaaatctacatcattgaactagacgcacgattacatagttcatttattaacgctttgtccttcattatttcgtgctcgaatcgattcatattcccctcattccccctcctgacagccttcttcttcttcttttattttcactatgtccgaccaggaacaacctcccactcctaatcccgactcaacaaacacaacccccaacaagcccaaacgtgcccctcccaagctaggcaagaagtctcctgccaagcaagaacaaacccctccatcctcggaacaggaccaggaccaggatcaggaccaggacaagcaacctaaagaagacgagcctaagcctgaagagcctgccaaacaacaagacccagagtccgagcctgagcccgagcccgagcaagaagaccagcccgaaccagaaccagaaccccaacccaagcctgaacgtcgtcgtcgcagacctcgtccccgcccacaagaatcagacaccgagtccatcgcccgcagcgaaatggaaccagagcccagacctcagcgccgtgtccgtcgccagcgccagccacaacaacaacaacaaaatgacagtccgctcggcgggcttcctggcgttggcggcgtagaccaggccggccagctcgtgcaaaacacagccggtaatgccctaaacggggtgactggcagtgcaggcaaagctgttggcggggtccttggcggcggcgaggagaagaaagacgatgatggcggtcgtgatgagcagcttcgtctgcggttagacctcaatctggatattgaggttcagctcaaggcgaagattcatggtgatttgacgattggtttgctgttagtattccctcttttttcttcttatgcacatctaaccctcccatttccccgtggctcttaacttgactccatacttctgttggtgcatttcactgactgacaatctagtaattaatcttgccgcttcacagcaagtagagaagagtacatacctcttctaaatatgcttatcctttctcatctcgatgagcattcgggccccgttccacggaggtatcgggtgtgcctacggatacattcaatgacttgtttatggtttatgttacagtgatgcacgatgcatgggttgattttcttttctttcttgttgatatttcttgtctgcagataggccatcctcctggatctggcaactatcctggtgtcttgcggtgtacaatacatttaaccttcagtcttggaaaatatctgagtcaggagaattggaataatgaactaggcttttgtgttaatatcttctaatccgatgctgtatagattgaaacaagttgcctagtaaagagaactttcggcttgcactgattgaatctcggacgggatgcagtgttcataactttttaaaaagcaggtcagtcatacttggttgaagccattagaataaaaaatatatgtgtattagaacactacactctagacaactcatctagctatctattatcatttgtgcaaagaatctactcccaacagaaaaccgggcgaagtaaaagaaattaaatacaaaaagaatcaaaacaccgacagatagagaaaagagtaggtagtataaccaaatcatatatgctctcttctcatcctttataccaagtgtatttgaacccatctaaccaaagaaaaaaaaactgtagctctttcaaagagccacgagaccattccatcctactatagcctacaaacccgcaacatacatcagtccgtatccaattgtgacaataaccacaaagcacatgagactggccgggatgccgcgggtcaggaaatggtggacttggagatatcgctggccggtctgaggtacttcagtcatgatagcagctaggagaaacaagttagcaagagagctcgatacaagtgaactgaaggaaggacatactcatattagggaatccactcgtgggcaatgccatcgcaacagagcacatcaaggcactagccatgaccaacaagttggggtgaggattttccatgctaacgccgatctggcggacaagcggtaggatgataagggcggcgacggtatgcgagatgaaggtggccatgacaaggatgagagaacagaagactaagaggacgctgtataggctgaggttctcgacacgcgcggtgatacccatggcgatggtgtgcagcaagcccgatgaagtgacggccttgcccagacacagaccaccggcggcgaggattatgatcgtccagaggaagttgttgaagtcctctttgttgaggatgccggtgccgaagaagatgacgagagggatgatggcgatgacgcccatgtcgccgaaaatgtgctcgagctggtggctggcgcaccagaggacgatcgtcaggagcgtgacgatgctgataaaggactgcatgccggtccagcggtctttgacagggcggatgggcatcacggttgagttgcggcccgggcggaatgtcaccagcagcagaacccagatgagtagaatggagatgatgcagacgggcaatgcgatgaagaaccatgtgccccagctgatgttcggctgcatgttctgcagggcaatgatattctgcggcgaggcaatcggggacgctgcaccaccgacattggcggctaacgcgatacccagcacgagtgccttggcgaagtccgactcgggaggcatgttgcgcagcaaaggctggatgatagagtagcagagcacaggggacgcaacattgctgatccacatactcaagaacatactcacaaacatgttggtcaataacatcacagatggcttcgatccagctttgcttagcacaaacatggccatgcgccgtgcgatgtcgtacttggacagcgccgctgcgattgagaaaccacccaggagtagcataatcacaggagtccacatcgccgcgaacaccttgccgactgattccttgggtcccagccgcgtgtgcggctcttcgtctgaccgcatgatgcctagagtcacgactaggaatgggataagaagcgaagtgacaaacagcggaatggcctatcactcaacgttagcattcaatgtgagtcaataaacaaacagtaacccatacctcagtggcccacaagatactaacgaggactagcatagccaagcagttctgctcctcgggagtttccatcacgttcaaggaaagcattacgccgaatatggcgatactaaatatcagcgtaccaaagctcaagctacagagccataacggaaactggaatcgaccaagcggggttgacatctcctgggtgcggatctcgttcttgtcgccctggcgccgggagctagccgggtcatcgccgcccaggagggtccggcgaataccaacattggcggcctgcgcacgtcgttcgatttcgatcatctcgcgccagacagtgttccgctcccaaacgacatgctcacgcagatgcagacgcagctcgcgcctagcagactgtttatcgttcttcgtgacgatgcccgcgtacacaccctccacgttctcaatatggcgatcgatttcagccatggtactttcagtgaaaggtggtgcgggatggacaacagtggctaggtagtctcggcgcaggctgcggtccaaggttttgtcatacttcttcagggccttggcgaagccagtcttgttcagctcgatgaaggagcgaagttcgcagagtgagacgtagcattcgatcaggcgcttttttaacgatataccggtattataaagagcgcggaaatcctcgtcgttcaagtacgactcgtgcggttctcggctggtcgccggtccaaagtaggaagagtctaccaaatcaccgtagtggtcctccgtgccagactcgccatcgatcgactgcgacactctcgggcgatgtgagacggccgccggggaacgatcgtcgtcgctatcaccaccttctccttcatcgtccgccatcgagtcattgctcacagcactagaccgccggcgcggagccgagacattgttgccgcggcgggagcttgcctttatgattgtctcgctgacggggtccatattaacaccgtccgtttcggaaagatatacaccagcgtcttttatgagctcatctgcgagttcaaaaatctccgcctccttcttctgatagaaggaacagatcttatccatctcaacgtcaagagcccttttaaagattgcatccgggttgctcggctcagcgcccagcagcggagcggactctacatctgtggtagacggtccctcaacgcgattgacctgtttctcgagggtgtagatcctagtcacgatgcaacgttagcaccatcgaaataatcatccgggccggtgcatcgatcctgtgcaatgtgacaccaattcagattcccgaatctgcatgtacacactatcccagccacagacgccctgatattcaacccaacaacttacaatttcttcaaattgctgtacgcgatgtagttcgagctccaatcgggcacagcattaaactgaatactatgcgagaacttcatcttggcttttgaatcaggatcgacgttcccgtgcgatgcgttgtgagcgcgacgtcggagagcctcagcccagaaccgaagatgaaagccctgaggctggtcgtgctctaatgtcttctcctgcgattcctcaaggatatcaaaatctgtaagggggtttgagttggcggcaaggtctaaccgcccaacgctatctcgatattggtctgagcgagcggggccagatgcggttgtggtagctgtgtgggagggagggaggtagtcgacaagttcaatggaatcggagtgcgaggtaggagccaccttcaagagagaggccggagggtagtcggcctaggtcattcaaggagtatagagagatgcaggactgaggggaaggtagcagtggcctctatcttgggtgggggcacgaagaggctcgagaagtccgggtcagttggatattggggttgcactaagtaaggcaatgatatagcgcagcactccactgatcggggaaagatcttgtatctggttggaatctattccgaggctgtagacatgtagaatattgaacatattggcggttttttttttctcaccccaggaaccgttgcgcttgagctatgttgtagattaggtaagcgtgctgcttggcagggcctatcagacaatgctctatacaaagcactgagagaggtgtgacagagaacaagatgaggttgatgtatagaagtaattgtattcaaggtgtgtaactaagtttagctgagggtaggtggtctccaataataggaaccgtaacgataaggagtataagccgccatgtctatgtatataagacaacgatatggagatatcataagcgaatctaaaactccgtagcatatgtcaaattccaacggttgatattggcttttcctcgggaaatatcatgagcccatgaagaataaaagtcaaattcttttgaccagactatataaatgtacatatgcagaagtgctcagagatacaagacaaacccccaaacccggatagaagaaatacaatccaataagaccaatttagcgacgagcgttagtattcaggttcgcacgaccagaaataccaatcttgtgctgttggtccctcttctcccagacaccgctacgaccctcagcaacggccaccacctcagccgcaacacggttcgcaaacagcgcatcacgtcgcttatccgacgcatcaagaatccacttgatcgcagtacggcggcgctggcgcagagtcagcgggtgaggaatctgcacggcagtaccaccacccgcgatacccttctgctgacggattcggaagaggggcgccacggagtcgacgacgagagtaaggtagaggacagggtcgagggggagctgagatgccgggggagccccgaggagacggcgacgggggttgatctgggggggagaggcggtgcggaggtgatccagaacgagagacatgttctaatatccagttagttgattttctcaacacaccctcgccaaccatagatgagaaaagagaaccataccttctgcgccttcgtcagtttcccactctccatcatcatcttagtgaactggtcctgcatggtatcgtagcgcttgcggaagttcaacgtcttcaattcctctgggagggcaggcggatcgaacttgagcccagggttttcctcaagagcctgaccctgcacctgctcaatcatgctggcaagagcagcagtggcctcatcactagcgccatcgagtccgggaatatgaggaataaggttagcctcgttgttaggctcaacaccctgcagatcgttcataaggcttcgagccgaagtcgagaacgagcgcgagccaccggactttttcaatgcgtcccgcataacctgcggcatgtgtttcatagcgtccttatcgcggctgaggacctgttccacgaaacacagttaacacgggcctttcggctttctcataagaccctagcaagctctcatattatgtattattgctcacctcctcaacgggcgtcccttgatccaactcgggagtagaaggaataccatcacaacgcttttccttatccataattcgggagatctcgttggcctcctcgctaacatcgggcagctggtcgacagtcgggtaagtctgctgatcgggctgtggctcgaccttctttgagccatcgcgcgaagagctccatcggcactgaatgggtagtgactgaacggcgcggaatcggacggggctggcgatgagtgcgggcgtggtggattggcgcagggccgagacggccttgttggctgtgaagaggttgagtcgaggcggcatggtttcggtcgtgagaattggccccggtgtaattattgagacgagggggtcaagattaatcggcctgttttgggaggtttgcggcgagcaaatttccggatttgcttagtaagcgccaagattttgatgtgaggtcatgaaatgtacaacaatacttgatggaaataagaacaaaagtgatggatactaattagtttaagcgatgattcaaggcaaaactaagcttcgattcgtcgattctagtctagcactaaagagaagactttttctgatgatccaagtgactatctagcgcagatatattttcgcaaagtgatgtcgatatacatctagtggttcaattttaatgttgtgtttgacctattttgagttactctctacatagacttatagagatatagtgggacatgcaattttgactactaaggtactatagacaggtactatagagaagtagttttgacaaagaatacaaagaaaacacggtagatgctatatgtagcgcatgaagaatcaactaaacaaaagagggacctggtcagagatgacaacctccacaactcgaagataaagccccaaactcaagccatagctcagttggtaacatcatcagggtagacatagaatgccaaggccagaatgatatacatgccgagacacatgccaccctcaaggtaattggactttccatcctgaataagcaagttaacaaccaatccagaaatgaagaaagccacggtctcgaaagtctggaagtgcagtgtcatctcgatatccatgatccagcccaggataaccaagaagggcgtgacaaagagcgcaatctgcaagctgctaccaatagcaactccgatcgcaagatccatcttatccttccacgcaaccacaacggcagtgacatgttccgcggcgttacccacaatcgggatcagcaccagtccaatgaacgtcttgctcatgcctgtggtctttactagggggtcgatagcatcgactaggtaatcggcgcaaatagagacgaggagagtcacaatgacgagcaccacacccgcagcccacgggctgagaatgcgctcctcctcctcgtgctcctcctcctcggcgccggcgatgttctcggtatcgctaccattcgtctcttcgaagaggtcggagtgagagcccagctggaagtagagatacatgacgtagatgatcaggaggatgatggaggtgccgtgcgataagataaggatgttcttctgcgcagcgttgtccgggtccgagttctcacctgcaccgtcgggattggcgatggagttacccgagatcgcggcgtagagggttgcgggaatgataagggatgcggacgccacagccatgagcgaggacatggtcgatgctacggtggtgttgaaagactgttcgcggtagcggagtccaccgacgaagaagcagcagcccagcacgagcaggatgttagacaggatacttcccagcatactggcctggacgacgcgaatctggttctgtctcaaggcaattacactgacctatcaagaaacaaagataaattagcatcaccacccgctagcaccggtatcaatttcaagactcgaggatcggcaagcttacaatcagctcaacagcatttccaaaagtggcattcatcaagccgccaagcgcttgacccagagtagcggccagctcctcggtagcgaagctgagtagcgaagcgaggggaacaatagcaaagaaattgagtgtaaagacagcggtggagtcccagccaagggcaccggcgatgatgcccaagggcacaaagataagcaggacgttgacatagtcgcggacgattgttttccacgtcaggtggacgacgcgcattggccattgcacccatatacggttgtcgttcgggtggtggtggtgcagtccatggtcggtatgctcgtgagatgagaggccggagaaggagccacggtgtgcgccgaggagtcccgttcgctcactggcgtccagggagccgttggtgccagaggccattcttcgtggaccgaaagtgtggcttcgaaagtgagagcggaagtttgggagagctgaatataaaattcctcgggttagtttggtgaattttgcatccgttgccagaacggaattgtataatttatgagactttcacagaaagccggaaaggagcggatggggaagaatgagaagatgggaaggggaaagggagtatatcaacccacacatgatttctacttggtaccaagcttccaaagagattaaggaatggttaattggttaatcggtgggggttcaagccgcttccaaggtttttctttcttagcgacaccgacatgaaatttccgaggaatcaaagttagcacagcctttcgactgttaggaacttgaagaacaaaaagtggggccctgagtgtttgccaaggtgggtgtggcccagtcagtggggagcggagctttgaaatgacgacccatcggccttggagctccacataccagagaatgggacgcgatgattggccacagtgcaatgccaaggttgtgcactgccacagtccacgattgggacgcacggaccgatgtgtttcggagatccatggatgctgacttggacttaatctaagtcaggggaaaaataacattatgtagattggaactatatagcacatggtatatctcttttaacaccaaaaggagaaccccagtccatatgacagaaaaaaaaaggatcaaagaagaatacaacagggtagtaagtcacatcgaagtgaaagaaaaagaaaataaaaggagcgtcaagacactggagaaaagaaaaagtcaaaaagaggtataaaggatagaatcgaataggaaaaagaaaggtgatcatcattactcctccggcagcacaccattagctttgaaatccatccgactgctcttgcggccgacacccttgagcatactgaaacgacgaaacaccgagtcccgcatcccgctattactattattgagcacaggggacaacggcgccgtgccattcgtggtcgtcagagtcatcacattactatcacgtgtggcaggccgcgaataatcgcgtgtagacgggagcgtcgaccacccaccactggaggcgggcgcaatccggtctgtggctgcaccggtggcaacagggccgcgctgctgggagtcggcgcgactgcggccgtcgtgggagcgggcagccgtgtcgtgggggacattgtgcgtgttcaatgaggtctgggattcatgggccacggacggcgaggagccgtgcttgtaggtcttgtcgccgaagaagctgcggcgtctctcgcttcggccgccgcgggagtggctggttgtgcggctgttaatcgtagccgtgtcgtcgtcgagattttcgtcttcttcacccactatttggcctttgctgtcggattgctggatggtgaagatggagttggtggcgccgtgggatcgcttgaaggggttgattatgctgatccgttgactgacggattgcctgtcggagcgcttgcgcgtgtgggcattgtttcgggctgcgcggttgaggtcttgttctgaactgccgactcgctggataggtggcattcgacgattgtcgctcgaggagggggactggcgagctgtttgtgtaggcgtaggtgatgaatactcctgcggagcagggacgagagaacctaactcgggctcgaagacatcttcaaagcgtcggagtagttcggcttgggtagcttgctgagcggggcgctggtaaagagccaatgcttgtttgatagccaaggcgtggtcgacgagtgcaacgaagagcgccgtctccattgggtccaccggctgctgtgttgcttgtactatttcaccgtcttcatcaagttcctcaagcagcttgttccttgccatctccgcatcggataggaatacccgatacgatgccacacagttagaggttgacgagctgtggtcaagcagtgattctagggcatcggtcagattagatagaccagaatcctcacccgacgcagcacggcgtccaataagctgaagctcctgtgttttgcgccacgtgcgctcaatagcagtctgcagaggcgagagcgtaacctcttcggcagaaatgacctcactacgacggaggatattcggaaatgcttccgagacagtgaagacgagcttttgaacgaagtgctcccggacatccgagctggtcgtgtgtcgtcgcgaagtggaagagaagcgagatggatccgagatcaacaggtgctcgcggacagaagacggaaccttggggcgctggtagacaggatgagacacatcgcggtatgcgctaacggcgctgatctgaaggaactggccctcatagtcaggtatctcgccagtagacatgacctgcgcagtagggtgttcccgctgcatacgatccacaaaagaggccatgcgttcagtcggacacgcttcgaatatgaactccttatcgcgtaggccgggaggaaacccaagacccttgtagaccacacggaagtaacgcgggaattgtttgttgcccttggcgatgtagtcataaattcgagccatggagctttgggctcgggagagcttggcgaagtccattgtcgtgtgctcatagtgcaccgcgagctccttatagcaagctaacgcggggccccaggccatggcattttcgaagttctggataatggagaagtataaagcctctctccgttcgaatgcattctgggctgggaatgcgggcctgagtagctccggcataggcttgatgggatcccattcgtagagatcggcatggaactgaagggcaagacctgcttcagtgaagttacctgccgcagcctgagcatccgcaagttcatgaacgtaacgaataaagatgtcctcgcgacccatgtccttcatatattccattaatttcagagcgtgcaaactttgggttgaggcaccgctctgagaagccaccaaaagatccaagagctcatcgactgtcccgaccagactcttgacagcattcgacaacagatcatcggatatagtttccctctcgaacagatccaacagctcgccgatgaaaaccttctggctgacgctctcgttcatctgcttggacttgaagagcgtatccaggctagagatgatctccgtttcaataatggagatatcttggttcagatcccattcactcagaatcatcgtctgcagtatttgaacagcaacatgtcgcagcccctcgtggacactgagacacagaccaatgatgggaggcaccaggccgggaacatactggacctgataaccgcccagccttttcagattgaatcgctccctctcgtcgtccgtagtctcccaaccaatggcttcccaggtagattgcaataagtccgcaccttgctcgcgcacatcgccggcgatcttccagacagcgcggcgcttctgctcggggaaagtttcgagcgcaaggacatcactagagatcacctttaacagagtcgtgaaaaacgactcccacagcttggtatcgaatgtgtcggcatcatccggtgccggaaggagtttatcaattagcaacactgcaatatgttcaagactcttgatagtcgcgcgatggttgtacacatgaatactgaaccaggtctcgggataagcctcgcagtcgaggatggagttgtgagcctcaagggtctgagcaacaaatagtgcaagctccaattctttcaagttgggtagcttgggagacgcgatcttggcaatggcagccatgagcgcagacagttccaccaaagactcatcgaagctttgaggggtcttggcagtcttcatctggaaggggaacgccttgctgaaaagcaaagaaagatactccgactcctctactccctcagtggagatagcacagtaagaggcgacgatagctggcatgaatccataaagcagaggatcaggctgactgagcaattgagccacgattgagttgctcagtcgcacctgatctcgatacaaatccgagacgcctgaggtggaaccccagtatggagtcaaccagccaatacagctggagatcaatgttcgtctctcgtcgccggaggcgaaaacatcaaacagagtataattctgaatgagaactagcttatagagtatcaacatgccggtgacatccttgcatgaatccatgaaactcagagcgatcataattatttcatccttgctcaggacgttggagagctcaggtagccacgtatggaaatgttgaactaccagtgttttgctgcccaccaaagccggcgacgagtttctcatcaaagtctccatagccttgaaaatggtacgcatgtctctgttgaaggtggattgcaccgtggtgatgccaataccttcctccttggccttttgctgctcgcgagccttgatgatgaattttaacagatggcgtcccaccttgaaggcggcacggagattgcgagattgcgtaccgtcggtccctgcgtttaagaggcgcaagtagcttcgaataaggcacggggtgacgaatgggaagttgaactgctcatcggcgtaccggtcgaccagcgggcctaggttgtatcgtcgatcatggacaattcccagaacagtgaccaggttgttgaagatcaagttctcgtattcttcattaccagcattctccaccaggattccgaacagcgcgtcgaagacaccacttagttgtttcacaatctcgatttcgggaacaaaaagtaaacgtttcagggtatccaagacctcgtccacgggccgctctcgccagttgagaagactcagaatgacttgatcctgggagtactctgtgctgcaaagatgggtttcaaggtgcaaagtggccaatggacccgtcacagcttcatctttggcggattcattcttgccgagcgcgctccatgggaggttcagataagcaccctttccattctcaatgctggatgtctgcttgtcataagcatgcaacagcagagaatgatgcccatctctaatgaaagcttgctgatcccaaaggggcatccaggcaagagcaaagggaaattctggcgcatctgcaacactcatcactatgtgcgagccagggatttgttctgtggggatcttgaggcggatggtctggttccaaggtgtgccgcgctgggcgatggtagtgcgccatgccgtgtttgaagttttggatgacgaagggaagacacatttgtctatccgagctcctttagaatcacgtacttcaagagtgagttgaagattgtgaagtccgctggccgcctgcagaggaatttgacctgcttgcgggtgagacaggagagcatctgtggggaataccgcctgacagagtgtaacgtagatatcggatcttggcttcgtaggagccttggagaatccaatgcgctgtgtctgtatgacatcgtgcaatatagtaggattctgacgaatcaggaattccgcatcgcaactggcaaaggggcgcagatggaggtgtaaacgtgctgcggggtcggcacgtacataccggccggtgggactaggaagcaaggcgcggatcaacttgtcaaagccatccgtcagcccctcgccgtcttcgccgtctcgacggggcgaccaaatgttgatcacttgttcagtgtccttatcctgtcgaagaatcggcgatatctccaagatcccaacgccaacagtacggatcgccgagacctcctttgttggtgcgggttgaggggtggttgtgtctttgacgctggacgcactgctcgatgttcgtggaattccttgagtaatgggcctaggtggctgatccaagctcggtccgcgttgcttgggtgtccacatcatgctgcgtcgcgttttcaaactacccttggccgaaggttgaacactaccatttgtcgtggccttggttggggttggggtgtctcgcgagattgatggcctcgacacaggagtggtatcagctgtggaccgggtctctggggcacgaacccaagcaactagataaagctgccgcccattcggagatccatctccgatgtctgttgcggccaattcggtgaacagtgtcttcagtctactgctttggctcatgttgacgaatttatcaggagacggaatatctaagctataggtctcagataatggactgagtgaaccagcgtctgaccgggagaacagctgtattccgatagtcacttgccccggtgcattccctgataccgcgttgatctccagcagcaaatgatggagtgcagtagcatcggatgtctgggtgggactggattcgagcatactcatctcggactgcagcttcgccaattggatagcagagtcatcacccgttagcaaacggcctctctgctccggatcgcgaacaatcacgtccccgctaagcattttgtttgccttgacaagtttccagactgtgtcgttccgcaatgcttccttctcctttccagtcagaacattgtgtagtaattgtcgtctcgcaaagtccagctcttgtaccacggttgacatttcctccaatacatcataccggcgtgccaaaagtaattcatgcaaattagtcgaatgccattcgcgcagacacgatgcgatttcatccactaggggctctgtgagagaggtcggagtttcatcgccgatcttaagcatcgggacgggggcaggcggcttcggcgcatcagggtcgcgaggagcaaatgagacaggcgtatgcgggatcgagcctgttcgccatcgcggacttgcctggtctgacccatcggtcttgtgaatgataatctgggaaggcttcccctttttcgcaaggacgacgtccgacacctcggcaacagcctgaaagtcactgacggaataagccagactatttcgggacaggaattctccatcccagccggacaaggtcagtcgatcaatgcttttccggtcagcatttagtagtgctttatatccatcgccgtcgcctagcacctctctaatctcaacgcagttccgcgggaagatacccgagaatacacgagcttcgagagtttggcctttgatgcttgtcaagccggccagtaacgacggcggcgcgactagatagcctcgacaccattcgccgtccgtccctccttgctcaattatgtaaagctcatcgccaagctccaatggtagatctgcgggggaggacgggttgaaagggtatatggcaacggcaaatgcgatgcgaggcagcggccgccagggcatggctgtgttgtgaatcgctcgacgcgattggagctcgagatacccgatttgaggtgtgccagtccccgcaaatgggtctccgatcgcaagcctcgcgggaagagatttcgggtatgtggatcagttcgaggaatgttcgattcggtcaatcgaaggcaacatgtagtgggaggagatcttagtcgtcgagtcccgaaggggggttgaataacgagaggaatgcgggaattcgaggaatgcgacaagtaacgatctaaagaggcatgattagggaggtacaagcgggaccaaaggaattgtcgccctgtcggaaagcgaggaaagagagcacagagactgtagttctctcatcaaaagacacgaacgggagttctggagtgttgcaattcagagtatctgtgccccccttgggcgacatttcggtggagaccactatttagaggcgtggggaaaagactcaccgtatagaaaaaaaaaacacacacacagggtaagtcggagggaaaagagaagagagatgtcagatagattgaaaggaggaagaagattaaaatcgcagatcgaagatcacccccacactatctcttagccagaagctgggactttgggggataactgctttcgccttgcttcatctgttagctacatgatcacaaggatactttaagattacatctcctaacatactattaatatgcttgtaaaacaataattgacaagtctcctgaacacaattcattcattattcacccgaaacagtccacatttaccatataaatgtgacaaggtcctataagatagcaacacgtacctacatagtacttcacctatgataccaaatgaagccccgaacggtgggtcaacatggccaatgagaagatataatatcttacataggaaaaagcaaaaaacaaaacatatgaatcagtttcaagagtaacatctcatttttcattatatttccagggtctcgtctctagtagttggtccgcgggtgtttgagaccttaatagttctatggtatggttggctaagtacataatgtatgcttcaattagaatcctcaagctctagatatcgtgcataagagtcatgccttaccttcacgtccaatacacgaatagtcaaaagcttaagtcgatccgggtcttctaagagcttcaagaagtacttcatctggaggctagtatttcagaattgttagtatcaaggagttcattatagtcatccaagataaaaaagacgaagtctcgacgcaggacacacaaactattacagcagcaatagctactatatatccacgacaatgagactgctgatgaacttaaaaggaaacttgaggatatcgacccagcctttagtcagaatggtggacgggattgttacagggactcccctgcctgattaaacccaggtggaaatgaatatccaattagctcaaaggaatccgagtttaagtgacatgggtgctgttctatttggtattgtctgtagtttggatcttcgcttcttgagcaattcacctcaattctcacgtctcactgtgcacctcgatatttgcctatttaggccctacgcttctcattgcactaaatcattgcgtggtcggtgtagactttcccgaagatggaatctgaatattacaaagttggaatcggaatgagacagaaaaaaagcaaaaacaaaacaaacgggaatagatttaactctcgatacaaagtacatcttatttccggaacatgctaagggtctcttccttgcgccagtccagatccacttgaccctcgtagacatcttcaatgatctgccgaatgcggtcataagtgttctcataacggttctcgcactcccggagcaccttgacaactaggctgcgactaagaccagggtcatcagcatcaccaaagtgtttctccacacgcttcttgagcatctcgatgccacggcgggtttccttgttgtcgtagtaggtgagaaccttcttcgccaccatgcgggagtggctggcgcgggctgcgatgtcagtcggcttagcgcccgccgcgaggaggttgtcaattgactgcacgaaatcaaccaacttgcccagtgggcgatgaatgaccgcgtcgaggtagagcctcaggtgctcttggaagtcttggtgagcacgatcggtccagcgttcaagtgcggggatgttgtgcacatctacttcctcgatgtagtggttcatgttctcaatgaggagaatgtggtagttcaggatctccttgtcttccggatcacccgcaccacccgcagtgacacccggaggttgaccgggtgcttccttggcaatgaacttcagtgactcccacatcgcacggttgatgcggtcgtacgcgtcgttgacgctaacgcgaatgtcacagaaagcgccggacgggaatgacagcatgctttccaccgcattggagaagttagggaacacccgcatgaaggaaattactcccttccgcttgttcaccttgactttggtgtcctcaatgcctcggatttgctcatctacaaatcggttgaacagtcccatcaggcgggaatggattttctgtagtgcatgaagaatgaactcttgattcgtgtcatcaaagtcattcatggcagtctccaaagaatagagaatcccgattccttggagaggatcagcctgcatcgcccagtccaccatgttctgcatctcagtgggccagaatgagtaaatctcatccattatttgctcgactctctttgccattgctcggtcaggatcatgcggctggttggcagagaaatcgggacaagagcgattttccggaatggccgcagagaccaactcggaaaaatcggcgctggcaagtgaatcaagatggaagaattggatgatgaagttctgctcctgagccatcatgttcagtgtctcccgcagcgtcccggagaatgcctcagacggctcagcccttccttccttcttcccgcctcccgaagccagtcgaagcccagcggcagcccgcaccgtcttgccccgtcgcacggtcaattttcgtgcagccatggtgagaccctcggcttctttctccttctcttggtgcgtgaagaggagttcctgctcatcacccgttggtttgcgtgcggtgttcttccaagccaggttattgtcgcggaagtcaccttggtacgaaggcttggactgctgctcatagagactgacaaggctatgccactctgccatgctaacctccttagcaaatagcatcaaggcattataccgccagacctcctgacggaagtgccctcgtgcggcgctgtccaatttcatgggatctttggcaccgttgctccagtcaagacgtttttgttctgccattttgaaggcaagggccatgaactgctgcagtcggttgaggaacatggttgcaatagagcgatattcttccttcttttgcttgatcgcacgcatctggccgatttctgtatcagcatacacgccgacacttgcatcgacttgacgtttcttgttttgtccaatgtcagagtcgatcgtaaccatggccttgtacaacgtcgctagagcactttcagtatccttcagcccatcgggattgctcaaagatgcctctttgagtggtcccagctcggttacagatattgaaagtgtcttcaaaagggtctggagttcgttctgcaggagcttctgatttgctgtttgtacctgtagaccttggccttgggcttcgatataggcgacatcctcgtgaagagtctgtaatgtggtctcgttagccaactgtagatcaattccgatcccgtaatcccgaaacttacgttcagttcatgggagtaaagagtcaaaagaccatccagctcgtcacactcttcaatcgttctgtcaatcaagcttgcaagttgttcaacctttccttcctgttgttcaaggttcccaagccagctggtggcctcgacacggccaatttcccggcgaacatctgcttccaaatcctcaatcttctgttcatcggccaaccgtccgttccagcccagatcagtgaggatgtcatcaaaatcaataccacgtccgtcgagaatgccgggatcgatcccaagggcctggcaatatttcatagtgtgatcttcacggcgtctgcgacgacgtccttgagttgccggggatggtgaccttgaacgatcttcaacatttacgacaacatcagaaagattctctcgtgagacttcaggagtttgaacaggggtcaccgcgatctcttcgggtgctggctctgtaatctcgacggttggtgtctccggccctacagtgggtgcaggaagttgtagatcttgttccgactttggtaccattggactctgcgggggatcagttagggatcgggcaagggacggcgccggaacaacactggtgatgccatcagggcccgcgagatcggcctgtgactttttcgcggctgccagcagtcgctcaccagccccaccaatcctgggcttgaaaccagcataagcatttgcagcctttttccatgcgcctgcgatatccttggcgtccttcttcttgaccatagggccgagccccgggcgatgcggctcgaattcgccggtttctccggcctgctctgaggaagcttgagatggcgagtccgcagcaggggcagtctcgataggggtcttgggcttttcattggaaggctgaataggctctacagagggcagattcgcagccataatagcggcaggctctgcagctagtccctcaattgccggcgacgaagatggttcccggggctgcgcatgggctccagctaacaaattatctgatgcacttctctcttgaggcagagaggggtgattaaacgtgaatgccttatcaccaccaccacgttggggcgactttggaccaaagctgggcgtggggcgtgggactgtgtccctattctcattattggaagaaccagaagtagtaggacgaagtgtatcattgctgcgcatgaattctggtgccttagctggggctggttgggtagtaagaggcgggggtttgggaccgcgatcctggctgcgagcggaagatggacggagtgactctggaatatcggcatagttgctggattgtgctgcaacagtcagattatccgttcccctcgattctgatagtgaactcgggggcattgcatgtgttgcgctacgctcggctgcgcgtggcggcggttgctggtccagaggtggcccagaaagaagcgaatggggaggagatttatgtagatcaaagggagatggcgccggtctaccgtgtcctgtagatggccgagaaccggtcgacggccgagacatctgctcgcggctcttttgggtgcgaagtgtggggtcttcagaaggcttcctcttgacttcccgaggcccatcgcgactggtatcacgacctctgtaggacggctgtagcgaaggaggtatcgagctgtctgatgttggaggtattggaccgggtccccttggcggtggaccacctggttgtggtggctgtcctcttggtggtggaccacctggttgcgctggctgtgctggctgtcctgattgtccatgccttgacaacatttgtcgctccttgtcatcaaaaccaacgaggttggggacctttccattggtgtatttcttgtagatcttgaccaggctcccaatgaagaactccttctccttagaagtcctggcatgccagtagtatggctttccgattgtgaccgtgaatcctacattgcccgcccattctttttgttgctgctctcccggtgttctcggcacaaaagagccgaacgtttgaattgcgcttaaatcgtcgagcatccaagttttgccaatagagtaggtcccctcattgttctctcgagctttgtgtatacggactctacctgacttccgaaccgatataataatgatacgcggtttcttgttctccggtggcccgtttggcggggaagggctagaagggtgcgccgaatcctcggtgatgcgaacgtgtgttatataggattcgagtactggaagtaacagagagattagcagaggtcgccggcaaaacgaagcaaacgccttgcgatcccatctaggccctggaaataactttcgtaatgtgttgccaaccataccactattctgtgggagggcaaagccgaggaaatacgttggtcgtgtacgtacagagaccatcttcatccttttttgcgaaacaactatgaatgatccgcttcttctcatcttcaaaagcagcccctcttgtcatagtgcttgggctggaacccgaatcggagtgcagatctccacgattcagtggcggccctggcggaggcccacggggacggtctctgccattcaccatggtatcgagggacacagagctcacgtgtgggtagccgcgagatcaaggggacatggtcgggagggtcgggatcgggcgacgccactacgcaccacgcgccgaaggaattgaaacgtgtcgaggaaataatgcgcttgtaaactgcagaatatgatgagggacaaagcagtacacgttgtggctcaaagtaatgcaagtggccagcgctgaagtttgaattagctcatcaatgtgtctcggtggaaccttggaaggcggagagcttggagcggagtatcggagtatcgaattgatccggggttacctatgtcaacaaacgtgcagaatgtcagagatgaatgttcaattgagcgcagatttttcatgacgattgcttactggcgcttcactatctcacttactttggctatcctgatacactaagatgttatcgcagtgcatggcgatcatgactttgatcttattggcttctaactaactaactaattgccagcaaaaagttagtcatccatccccagggccggtctggtttcagttgtataacatgcgcgatagaaactgccgatgtaccataccttcaagacattacatacattattcgcaccgcgttcgatttccctagtcaatttgtgtccaccattccaactgcaatcaatttcatcactgggaataagaacaagcttgctgaagctagagcaattccaggtgatatggtgcagctttcaatcaaaagcgaaagtccttgaaattcaaggttctcttgaagatattgtgcgagacaagtgtcaaaaaccagctatagaagtgtccagctttcagctctaatctaaagcgaagcaaatcagaatcaaaagaccaaccggttattcagaaaacggtgactcttcggtatcaaagaggacagcatgactagaagttctttattcaaatgcagatcacatgtatatttccgaagttgacttcatgtatgtatgcatccatccatatcggtatatggcccaggtaaactttgagtgccctgaattcaggggcactattttctgtcaagacagggccgttgacctgtacaagcaaacatctatcttgaacctggtggtgctctgatatcagggaagtttcagaccggcataccatgtactagtatttagaaagaataaggcacaaaggggtggagactcggtctaaatatgcacatagattagatccgactagagaccgcagcggtgaagagatgtggccaataagagagcccttcgtagataatgccgaaatatccgcgcaccaatcacaatgcttactcatatcaaccaataacagtgaagctgatagcttaccgccttttatatactttttttttcctcccttcttttttggttcctggcagattatttctaaatagtctcttcttgccccgggttctcttccttcgctaccgttgaaacgaaccgctcagtcactatggcaaaggcttccagcaagaagacttcggtcaagaaggtaagcttcatttaccttcgattgacatatcgattggcatgatctacaaacagacctgactgacaatgccctaatttcacagactgattcttccaagaccaagtctatcccccctcagctgatcgcctcagtcgcggctttcttgtcggacaatttccctcagactagcgtcgccttcactaaggaagcgacaaagtcgggcaagcagagcgatgcgaaaaatgttccctctcttttggaactcttccaagcctcggagcagaaatctagcgtgaagaagtctgctagccccagttcttcttccagctcaagcagcagctccgatagtgactcggatgttgagatgggtgaggccactcgctcgtcctcttcgtcttcctcttcgtcttcgtcttcctcttctagctccgatagcgatgcggatgatgaggatgacgatgataagtctcctgcggctcccacctccgcccccagctccgctccggctcagaagtctgccggcgtgaagcgcaaggccgagtctagcagcgagtctagcagctcctccgactccaactcctcctcttcatccgaagatgatagccctaaggccaagaaagccaagacatctcccacccccaaagaggcatcttcctcttcgtcttcggattcttccagctctgactcagactcctcgtcgagctcctcttctgattcttcgtctgattcctcctccgactcttcttctgactcctcttctgagtcttcctccgactcctcttctgagtctgagtctgaatcagagtccgaatccgaaaaagaatccaagaaggccctgaagaaggcaaagaagacacctctccccgagtccgactcctcttctgactcggagtcttcttcatccggcagcaccctcgccgcttccccagagaccgagaccaagcccacaaagaaggccgtggagactgtgcagactacctcatcgagcgccagtcccgctcctggcaatggacctgccaagaagaagcacaccggagctcgccctacccctctggccctcctgagtgaattgccccatgaccacccctcgaacgactacatgtcgtacgcctatgcagaccgtgcctggaaggacttgtctgtgacccgcggcaagggattcaccaaggaaaagaacaagaagaagcgtggctcctaccgcggcggccccatcgacattgcccccggcacgacctcctacaagttcgaggattaaacgacgacgcttgcttttgccacacgaacgtatttgctagttcataatatcaggctatcgtcagcatctaatccaaaatttgccaccaaacccaggctttttgtcttggatgtcgctttgccgaagggaagaatcgctgtctttttgctgctgcaatatttgcattacgactcaggtttgttgcaatggatcaatatgaacagccagggctcttatatcccgcatcattctttaccaatttcactcagcatggcgtatggagctatggacaaggtcgttggacccaagatttgccatagaatcttttttgcttattagcttacatcattcaaaagtttgaaatccgtcctcgacgaattctggaagtattttcaattctccatgaagtaggaaaggacgtaacctacgaacacaaaccccttctagccttattagtctctatcaaaaacagtgttaggtacccccgtacaaaacaaaaaactataaaacccacaacctatccatcctgccttctccaagccccaggctcctccaaagtctcccacctacaatcccaacccgtatgcgtcccacgagcagcatccccaggcttaagatccgcaaacgcgcgctgagtcctcagcttagaagtggtagcggagtcctcgtcatccgggcgctcatatccagccaaattgaatgcctcggcgttccagcgcggtaaactccccggacccatattcacacccaggtccagattatattcgtaccactctttccccggaccggttaagtcatccgtagacgcaaaatcgagctggaccaccccgtccacgatgcccgtgtagacggtcggcgaggagggtgagggtgaggacattgtgtagatggggccgcggtaggggcctctttggcgggtgcggactgggtgtggagtttgttgggggaatgtagggggtggtgggtgggagaggaatatggagaagccctttttagggcggggttttgcttttgttctgggtatggtgttggcattgaattgcgagtcggggaattgtgcatcgaggtaactgtatgtgttgcacatgcgtaggtcgaagattttgaccacggcttcgccgccagctccggctaagaagcggtcatggccgaaggcgtggaggctgtaaatgggattgaggtccgtggcgtctctgtaggagacttcggagggccttggggagcgcaggtcgtgaagtcttacggtgtagtcgtcccaggcggttagaaagacttcgccgggggagcctaggttgtgttcattgagaggctcaatggcgccgatattggcctttgatttaaggcttgtagagtcggcgtctaaagaaccaattccgattgttcgatatacagagacaccgtctggtgtgattttcgagatagacaaggagttttccacatttccagttcccactgccactagtgatgaggatagcagtttggagtagttggttcgtgacgagccttccagtcgaagccatgtaaatggctcgattacttcgtcgtcagtctcggtatgatagaaagcgatgcttccattttcaaaatgagcagccaaagtagagtctgtgccactactcaaatctgttttatcgaggttgagtccaaatgatataaacttctgcttgtgctcaaaggttgcttcattgggagagatggcaaggtgaacaatatcacctcggacccgaccgaagatcagatgctccacatgggtatcgttgctgtatcgagtcgctgaggacaaaagatgcagagaacaaatgtcgtcatagctgctaacatgatcaatatcgttaaacacaagccagtcttcttgcgcgcgaacaccagtttgcttgatcctcatcacaagctgattggcagcaccccaggcaaggacctctttcctatcagcccaacgctggccattccaggtctcgtaagaatcaattgaaggtctgtacccgagagtcgggttatcttggcgagtcacctcgtgagaaccgattttggtcgcagttccaggtggcacgacaaatcttccgatgatggcttttctgtccaaggcccgcgacctagaggtcaaagctcgtgcagcatctttccagaatggcggtgtttcgatatatggaaatctacttcgcacaaacgctcggaagatccgagaattttcagctgtgattatgccgtgcagtcggtgacatgtctgggacagatgggccaatgcattggcagtcgggagatgtgttgcgatttgataaatgatctctgatgggagctcggagagcatcttgaacgcggaagccagacagagatgtgagaagagtaattgtttcgggctttcagactatcgccatcatttgttttccgccgcttttatatgttttgctgttcattgagtgtgctagaaaggggaagagctccatttgttcaaggacaagtagattcgagcttcgatttatattcaatttgacaattttcgaccgtcaagatgttgcaggtcagcaatttcatacacaaattgccccatgtgggcactggacccgttaccttatgacgtaagcatatgggctcgcttgggcagcagctcagcctgtcctctttttttgtgcaccaaaaaggaattgtatagatactggagcttcaaacttgagaaacaagactacattaacgtgtatagtagtttctaactccaaaggaaaaggatctgaaggcacagatgcagcaacgtagtccattatgtacgcttatcttatcgcattcccggggaagttgtaatgtcacaggtctcgttggacaagacaagtttccctatcgaatctaaaggcgcatatacactctcctcagcggaatctgattcactggctgtccaccggcagatgacgaatcagagtgagtgggactcgaacggtatggggcttgtaggttaatcttgcaattagggaacacactcggcaccacctgtaatacacggatgagtgttggctggtctaacagctagtggcatagccgcgtcggcaatccccattgtatacaaccccgaggtccggagggattcccagcttttctcatatttgcaaagtatctagattttcaccaactatctacagtggacggcaaacaccggcactcataatggcttattcgatcactgctcttgcggcagcattcttcgctggcctcatcttctacagagtgttcatttacccagtgtttctctccccgttgtcgaaaatccccaacgtgcactggagtgcttccatctcgcctgcatggatgttatggaggcgcttcacaagccgaaataaccggacaattcaggccgcacacgagagactcggtcctatcgttaggttaggaccatcggagatctcgattaactgtgtcgatggaggaattaagacagtttatgctggtggatttgagaagcatgactggtacccacgagtcttcgggtcatttgggttagtatagacaccgattcacagtaaacaaagtagctaaccatgagaaacaggacagtgagtatgttcaccatgacaggaagcaagacacattcaacccgaaaaaggatgttgtccaacatatactccaaatcaactctgcaaacatcccctcatatgcggatagtttcagacacagtcatcttcgatcgactgctgccgattcttcaagaagtgtcaaagtctggcaaatccatcgatatgcatgatctagaccagggcctgacgatggatttcgtctcctcctatctattcggtttgcagaatggcactaattacctgcaagacgattcggttcgtaagcactggcttcacctttacatgtgccgaaagccgttcgagttttatgcccaggaggttccatatttgaatggatggctgagacggatcggtcttcgcgtgatacctaaatactgcgacgacgccaatgaaatgcttgatgcttgggctctggacctatgcgatagggcagagcagatgatttcgtcgaccgagccaggaatcgagccaactgtctacaagcagctgaaacaatctctggacaagcattccacaaagaatggagaagcaaagccagataaggcccagcaacgactcgatattgcttgcgagatgtacgaccagctgactgccggctttgaaacaagtgctgttggtctgacatatttgttctggcaactctccctacacccagaagtgcagaacaagctccgagaggagctactcactctgaatcccccgattttatatcccaagacagccgatctgccaccagccaagtcaatcgatagcctgccactgttagaagcgatcgtgacagagaccttgagacttcatgctccgatccctggcattcagcctcgggtaacgccatctccctcgtgcattttggccggctatgcagacgtcccacctaacactagagtgaatgcgcaagcgtattcactgcaccgcaatccggaagtattcccagagccagaaacctggcagccgaagcgttggctggaagctgaaaactcgccggctgatttggaagagaaacggcggtggttctgggcgtttgggagtggaggacgtatgtgcgtgggaagcaatcttgcactgcaaggtatgaatttaagaattccaaccattgaactatgctgattactgcttggcagaaatgaaattggccgtggctgcgatttacaccaacttccgcaccacgattgtcaacgatgacaacatcgaggccatcgatgcttacactgtgaaaccgacaggtgataaactgatcctcaagttcgagtctgtctgagatataccaggaggggatcttgcaagtgcagccattgctgcaagctgtatgagctcggaatagaattaattcgatcaatggaaaagtatcaacattgcagctgaaagaataaacactgcttcccgccagctcatgcaatatccaagagcgtaaagtggctaagaatgatcgcaaatcgtgatctaataagctaggatagcaacaactcctgtccccggtttcggtagcacggccatgttcggcctcttcggcgagtgtagtatgcagactcctaacagcccgagagcccgaggatactaaagaggagaattgagagctgcgagtagaaatttgatccagcaaagttcgcagttcttcataaccctcatatcagccacaatccatcaggcaccaccaaagagggatggcagtgacattagatcgtgctgacctggtgattgatcattattatgtggaggatccatacacgcatatgtaggaaataagagttaatcaattgttctgacaggtccaaatcccacatagttgtatactgtacatatgagtaaaagccaactcccatagcctctgatgcaaaataagcagaccaaatcagaaaatcctgataaaggccagagtattcgcgtaataatgtatcaaaaagaaacccaaaactccaggtggacagctcgctcctgctgccaagtccggatagtcgtgcaaagaacattttaaccgagaacaccgtccttcttccgcgggccaacaaccttagggtacattctcatgaggtggtagttgacggtgttcttcttctgctccctggatttctatagatggaaataccttgttagaaggatgctgacaataatgaaaagaacggcgatggattataacgtaccggtgcatccatgcacttccgcaattgagcctcgagagcagagcagccctctgcgccgtatccagcggaagcccagcagtctgtagcaacgcaaattgtcagtcgagattcaaggtacttcgaagccagggcgacgagaaattgatagcgtcaatatccctaaggaagaggaacaaacatactcagcatagaggacatcactaccacgcaggggttctgctcattctgattcggccggcggacacggaggtggttgatggtgttgagacgcatcgggttgagccgggtggagagggagcctttgggtgccatggtgggcaattattaggttcgtagaactggcaatataggtatcaattggaacaagaagaggccgaaatgccttgaagcgaccgtgtgcaggattgacgatgggatactggcgccggcgacggatcttcgacaaacaaaatccgaagtttcgactccgcggaggtagatgactaatcttggccgcgcccccggccctcttcatctacctcgagggcttgccaccctatttacaagacctatacactctttttgatattgcaagtttgtcaaaaccaatacatggttgttgaatatgtctgggagatacggtttgccaacacagttccgtggcgtttcttcggtatgcacctttagagctccgatagctcccactcctaggcggttctccgcagcatgccacctgaaccaaacatcgcccacgtctacggtcaagacggaggataaagatagtgaaaatggctcgaaagaagaagaaaaagatagtccgatgggacgccgtctagctcaaatgaccgaagatgcgatgctagaaggtggacgatctgcgcgtcgtaacatcgagcaagcagggttctcggaagaactgaaaaataagctcgcagagcgcgttgctgcttcttcatttaggagtcagtatgctgctgctcattctatagtcgaaatgcccgtatgtgatacttataatgtcctactgtccaacagccactaacccacattccattattgcagtctgcggcagggcaaggcacacgagagaacgccgccgctcctccatggacaggaacagagcgtgtcgaggacacgactctgcgtatgctagatgacgcgagcaagccaatccgaatgccttacaaaatccccgaccctgtgaaccttagaatccccccgaagccgaaaaagtcccatggagagcgaatcgccgaagcgaaagagcgcacctctacctacacgctaagtcgggctcccgggttttccgaagaggagcgcgagcatatgcgccgtgagatgagggagaacttgacacccggggcgtattccatgccaatctcgatctcgggtctttcgtcgctggcagatgagcgaattcaagatgcgattgcacgtggagagtttaagaagatacgtcgtgggaaaggtgtaaataccaagacggaccacaatgcgaccagcgcattcattgatacaaccgaatattttatgaataggatcatccagcagcaggaaattgtgccgccgtggatcgagaagcaacaacagcttggcgcggaactcaatcgattccgcgaacgtcttcgagcggactggcggagacatgctgcgatgttgattgcgagcaagggtgggtccttggacatacaaatgaagcgggcaaaagcctatgctgcagccgagactcgactggcagacaaagcaaagttggaggctttgtttgaagaggatacgtccgtatccgagatcaacactgatggccggattgtctccaagctagagacatcccagagatcacctacaataaatgacagcgaaaaagcctccgaagatctagcccatcttccaccattgcgagaccccggatacctcgcaatcgaacgttcttatcacgaactcgccgtgaaacaaatcaacagtctcacacgctcatacaacctccaagctccagccgccgcccacaaaccatatatcaatcttgaccgagagctcaacgcatgctatgctgcggtagcgcctgacttggcagaggaaataaaacgccgagcgacagagcgtgcgcgtccgtcatcaaccgttcccccggtttcttccatcaagtttgggtcactaggaatggcgcagtctgtacatgttcgcgaagaagatcagtcgaagggatacggtataaaagagctgtggcgcgatttattcactaaaccctgaagacagcaaacgacaaaacagagaactttcacccttctgttcatcctctgtcaggctatatcggagataatgatacaccaataatgtgacatagaacatgagcaatggcactcgaaataaaacagacaaagcgggccaacaccacctcccgacccttcaatcttttccctcgcaaaactggattggaatcttccgctctgctacgaaaagaggatctccacacgacgtggctttctcgtcaaccacagaaagctcaaagggactccgacgacgccgacggtagcaacaataccaataccaagcccattgatcaaaatgaatgaggcagcattcattgtcctcatgccagcagcggcagcaggcaagcccaggaccaaacagagaatagagagagcagccacaatgaatgcttgggcgaggctagacaaaagtttacgcttagccatacgcctgatcgcgggcggatccgcgtaaagacttgatgattcccgtagacctcgccagtcgaagatagctgcgctgacgcaggtgataaaatgaaagtacgtcccgaaagcgaggagaaggaacgcaaccccgataaaatatgccgcacatggagagatgctcatgtacatgcccaggtacccattctttggattccaagcctggcaacaagcctcattcttagcccacgagggaatttcggtagtcatattgctggcttcgtctcgcttttgcatggggatgatgaaatgatgccacgggatctttgggaagtctcccgggggccagccggcttgctcaagatcggaatcgccgaagggtaaacgcgagatgacttccacgtccccgacccagatctcgttgacggcgttgccttggtcgtagaaatggtctgacttcacgccatggactgcggatactttgttgcccattcgtgccttggacaaattggtgtgagaataatggggtggtttaatgattctggtacaaagtagtaatgattcttgtatagaaagaaattgatggatgatgaggatgagttgggcatctttctcagttgactgggcaggtaatcccgaaagcagcaaaaagggaaggtgctttggtgtgttccttagtgaaggagatggatattcttgtcaacctcgagggtttgcatctattctatggtgaatcgtcctatctcgataggaatgctcgataaaaattgaattatactgtagcataatgtcattcagagatactcgtcatgcagataattgcactacggcacttggggatatatctgaatggtaatatgcttgatttcagactaatgaagtgtatttaagtatccatactctcatgtatctcatcctttatggaaatgttctaaaataggtcaaatggacttttgcggcagttagtgttctctcccctgtgagtggtcgccgcgatgtgatgatcgtgcatgagggcgcgtatttctgaccaacgacaaggctaaactagaatgctttgacctgggtactgactttctcttcacttcatcacatcctatgcttgcttcttatacgtagcccctccctctgtcgcccctcctctgcaacatgtatcacccgctcgtgtgagattcgacgtttgaaatgtcgatcagtgactacgacttttgaaattattacttctcctcacccccaatatcttttataatcctggcggaaatgactaccccggttgtcttctttttgcctatcctttttactgtcttgattgtacatagtacctcggttcaggcccagaaggtccaacgtcaatcaaaacccgctgcgcccccaacagtggacaagccattactagctattcaaattgggagcattgcgggcgcctatgtgatcttcgtcgctgtcctcctagcgctacttatcttcgttggacgtcgcctgcgtcggacagttcagtcgtccaactatacactgcatatggaaattctgaagcctgtcagacctcctgtcagcatggatcccagcccgatttctccagtgtcacacaatctccctagtcccagatcaagtggattcaggtcctgggggtccttgaacagaagtaccaggccgtcccaaccatctatgaacggcagcatggtgaccatcgacgagtccatcgtcgcgaatgaccgtcaacgagcccagcatgatatggagatgctctatgcggcagttatggaacatgacgcccagaaggcttccggaattgatctgtcggtccgcgaacaagacttccatgcacaatcaccggacagtcaactcacaaatccattcactgatcgcggctcccacggctcagagaactcattagcaccattagctccattgaagtcccccaccaaaggattcaacagctcccgcttatccaagctcttcaacccaggctcccgcgccaatccagacccgagcaaagtgcgctcgccgcgtctggctatccgcaaaatgcctatctcctctccattagcctcgccagcagtggccacgcctcaagcctatgtgtttgaaaacccgcctctttccccgcggatttacaaccccggtcctcctccaatggtgccgcagcagcatgcgagtgagtcaatcaggcctgctcctgggcgtgcccgcccacctgcgcctctcactctgtctaccccctccccttcttcttctgtcccgtccaacctgcctttccgggaggcatacccgccgcaaagtgccccggctaccaagaccactatcttggaacgaccgatgaagaatcgggcgggtcctctcacgggcatggctacaccatacagtccgtacatgccatttactcccgtgacgccctttactcctgggcgcacagtcacaaagcgacagcggaagcgggaggagcgtgggaatggactgcaagtgttgaacgaagatgatttggttaaggatgacaatgatatctggggatgaatgtgtcaaatttagtttaggcgttcgagtgcattcggttcaatccatcgtttatctatagagaactgtcacacctacatacactggctgtataggtctatttcagaatctaatatcctgcatagctcgtctctagatctatatctacatcttctccttcaaatgtgtattccctctaacaatcgcctcagcaaaatccgacctcgtcccggccttctcaagactcaaaagtgtctgaatagtacaccccctcggcgaagaaatactctccctaacaaccgctggatgctgtccagactccaacacagcagacaatcccctgatcccctgcaaaaccaactccatcgcatccgcccgcttaaacccctccgcaacacacccatccagcaacccctcaatcggcagcgtcaacgtcgccatcgtcgcgccaacaagcacagtcgccaacccgatctgctcagctcctaggtacttaaccgcaccgacatgcttgaaaatccactccgtaaccagaaccatggctggcgggattgacggcgccggcgtttcgatgatcgtcatcgactggccgaactgcgcgcccatgttcgggatagctttcatgaggtgcggttgatctgcagcgccgggatctgggttgatgaggcgggttagggtttcgcacgattggcctgcgagcatgctgatgacgagtttcccagcgagggcgtcacggacgccttcttctcttagaacggcttcggccatgaagggcttgcagccgaggatgattacgtcggcttcttgcattgtttggacggtttggtcagagacgattttgattagttgttggtgctcgggggcaattgttttttcgagacgggatgcggaactggctgtttttgtgcaggcgatgaagcgagttatgggatttggtgttgggtcagtgcttgtggctgagaatacgctgtttaggaggcctttaagcacggcgcctcccatgttaccttggggtttgttagtggtagttttactatgaatgttatgtttacttaccgcatccgatgaatccaagagtctgtcctgaggccatgatgttctgaataccgagagagacggagagttgattgagttgaggggtttggctatctatttgactcatatgggatctcgggtgaggtgtccgacgttggcggcagccgatgccgagattagttttaattatttaaattgcagaagaacatgtttagaggattatcttttgaagctatatttgagatgatacgtcaattgccctcgaatgattccccgtgcttctttccccatgtctatgcaagattacttagaatatcacccattgctggacggagggtcaaatataaagcccaattccttgcatgagttatcttcgagacctgcaatgagcacaagtccattcattccattattcacaaataatatctgatctttgcctcaggcgctaactccgccttacaagtggcgtataacagattaccgcattgggcttggcttcgtgttccccaatgcagcagggattcccgctatctcttcaatcttcaatctttacactcactccttttttgcctaagaccctctatggctgtcaagatctaagcctggacttaattgtcgaatgaacaacactgttgtctttttttatcgactttgctgatcggccccgctattcccccacctcacaagttgcaactgtcgtcatcctcggagaagtcgacttgctctttccggccgagttattttggtggacagtactcccgtaccttgtctcttactccattagaattcgtcgtcggataacttgtgtgtacaataagaggctgtaagttatctcactcttatcttggcagaggcgcggtttggactcggactgtcttggctaactggaacttcttcgcaggtctcagactttctctcccctttcctccactactcgtttacacctctctgtttttttgtgtttccagtacggaccgcctacatgactctcaccgtcctctcccaaacccagctccgcgagctgctgcacgcgctctctcgcgacgagatccttgaattgcagcgcaatctcggcgaggctctacgagaatactccagtggatctcaggaggaaggctgctcggcagcttaccaaccccagcgaactgccattactcgtcagaatggttgcaccaccctcttcatgcccgccagcacgggcaagaccattggcatcaagatgatttccctgcaggacgggggcgctgccggctgcgctaatgaacaggagaccgtggatgcacaggagaaggaccagatttcctcgcgcagacgaggctctttccggaactcggtggcttccatatcctctgatttgagtgatttatctttgggctcccaagaagacaaggaggacaccaccaacaatgacagcagtgtggcaggatcaagcacggatagtcccacactcctcactggttgtgtcaatcagcaaaatgtcacttcgaatatttctagaactcttggcgcttggccgggcgcaggaactcgtgacacatcgccgcgcggcagtgtgacactcctagacgacgaaagcctgccattcgccttgatcaacgcccatgagctgacggcattccgcacggccttggcttcgctgatgatgttcaacaggcgcaagaaggtgcgcactcttcttgtattcggagcgggcacccaggcttactggcacatccgcttgtcattggttctccgcggtgacgacatccgccgggtatacattgtaaaccgttctttcgaccgcgcagccaaacttctgcaggatatctatgggcctgaaaacagcgaatggcgcggggacgtcaagttttccgcggtcagtactgatttcggcgagtatagtcgcatcttgaaggatcacgtgcgcaaggccgacgtgatcttctgctgtacaccctctccggtgccacttttcccagcggagtacctcacctcgagcgaaggccgtcaaaagggccggttgatttgtgcgattggatcatacaaggcacacatggccgagatccacccagatatcctccgagacgaggtcactgtgcagggtccacatagacactggcacaagcatatccaccgcagtggtgtgattctagtggatagtctcgacgctgccatgaaagaggcgggcgagattattcaagccggaattaaaccgaaacaagttgtcgagttaggcgagctactgatggttcgtaatgccgctcgcgaagcggcgaccgtggatgaggaacagagcttgcgtgagtgggcacaacgggggaacgtcatctacaaatcggttggacttggactgatggatctcgtgactggcggagatttggtgcgcttggcgcgggagcggaagttggggaccaccgtggaggatttctaaatgacttgggcgacttggctttgcactttgccctttgcacttttaacgacttttgattcgatacctttttttgcttattttacattgctttctattggccgatcttttttctctgggcgtctgttgttccagggaaatttcgaagatcaacagatctgccgaaggtgccacaatatctttaaattaagagaaacttgaactggaatacatgtcagaatacacatggtatgactatcaaatagcatttgggagctggaaatgagaacaaggaacaatatcatctctatcatagaacctgaatatcaaagtaaaagcttgcacataacctccaatgatagtgggctgatggtctgcgtcatcgggtatgtaacctccaaggctctcggacaatcttccctctcgtttcaaacgtttctctgagcaatctcccgctgcgcattaccaatccagctattggtattggatcttgccctagctgctctagctgctttagctgctgttggcgcacgagtcttcccttccccgcgcagtgaggggccaacgcaacgataaagaaaaagtctgctctactataagaagccttatagctccccagaatacaccccccagacatcctcgccatgcgcaacaccacctgctacttgcccaatggcctctcctttaatgtatcgcccgttttcgggggagtcaccttcaaatccgccgatttcaacgcacagaactccaccttccccccaggttggacgattatgatcaacaccgagaatgcgagcaagacagacgagcaaggagatgaaccagactcagagaacccccgcgacggtgacgataatttttcccgtttcactacccccaccttagcccgcgattccctctacatttcctatatagtcaacccaccatcaagcgagttcaagcccgtgacctcacccacacgccagattgccatgatgctctgggcaactctatggtggtacttccacgagcccgaaccagacctgcacgtggagaccgtcgcatcgagcatgaccccgcgcgacggacgaccaaaaggcgtatggcgggtcaacatcaagcgcgaaggaatcttcaaaggccgaaaccttctccagaagctcgagcgcatgggactaatagcgaccgaagactcctccgtcggcctccagcccatggaatcccgcgactcaagcagctggtcaacgatgttcgtcagccggcgcagcttctggcagctcgacccacgcctattcctcttcacactgacgccccgcggaggccgtccatcaacacctccctaccggtcacggaattcgtctcccgcgtcgtcagagggtccgccccccgcagcgccgctggtgctcgcgcccatggaggcaatcttccacacggcgaatatgggcccattcacctcagtaggaccgttcacgtccggcagccatctacccacatactatccgccgccgccgatgcagttcacctccacgaacggcgtgcgacaccccgtgcgcccgaaaccgccgcaccagggcgaggtcttctacgtgcgctacatccccagcctgagccagtatctctcattccgcgtggcgtttgtgccgatgaaccccgggggtactgctagtcggcctgggacgcctgttagcacggctgtgacgagcatcacgcaccatctcaccaagaatatttcctcggatctggacacgatgcaccggtggatgaatgtcccgcgggtggaggcgatgtggggtgaaggtggggataagtccgtgcaggagaagttcttgctggctagtctgactagccgccacagcttccctgtcatcgggtgttgggatgggaagccgtttggatattttgagatctactgggtcaaggaagatcggctgggacgacttgtggaccacgtggataattatgatcggggcattcatctgctcgttggggaacaggagttccggggtgcacaccgggttgcggtctggctgagtgcgttggtgcaccactgcttcctgtcggatatgcggactgaatctgtggtgttggagccccggattgataacctcaagtgagttatggacattgatttccaaggaaaggaggatatatgctgacttctcccagactcattaattacctccaagaagcaggcttctacaaagaaggcgaggtcagcttcccgcacaagcactctgctattatgaggatcaagcgcgagtactgggaaagcccggctctatagagctgtcacggcggcgatttgcattgagacgatcacgagtaacgaaacagctagcattacctggatttgaaatttcttgctatttgacttggccatttatcatgccgttagcccaatagaacgaccggtatggtcattgcttattgactagacctttgatttcatcttctatcttctagactcctttccctaggttgacccgacgagaccgtcctgcttcgaaatagtgtattcccagctgcttaggattcgtatcataacgagagagccgtgatatgccgtttcccgaggaccatagtacgacgttacgaaatgttcgatgcttggtccggaggctcccatcatgtcttctgaggctcactcatttcgcagtagtaaatggtagattggcaatctagagaactgactaatgttgatggcttgatggaaataaaggaacagaggcctttaagactacaaagaaagggacctgtcaaactgtctgagcaagaaaaacaatctgcgctcattgcaacatttctacccagactcatctgatgtcgatacggttgcttagcaatagcgatatataccccctaagcccatccgaggctcttagcgagaccgtagaggcatatcagtcctgtcccaagtaacaacgattgtcccatacgacaaagatcaaggcgttagcacaactgcgcattcaatttcgaaaacgcctagattcgctagacccacattctctcaacgcttcgtggcctgattcagataccgtatttccccgctaatagggtcgttgaaagtagcactgtttgtgtacagagaatccaggactagcctcacttcatggaggagatcagctccaaattggggatattgttgagctaggtcggtaaatgtgtgccgtttgccttggagataccagcaaacggaggttgcggctaaagtacggcgtacgggatggccgttgcgtaggagagttcctgaaataatgtcttcttctcccagccagcgggtgttcttgtcgcttgtgtcgaaatttcggtagtattccttggcatcgggatgtggattggcaatagccttcttgatgtatcgggccgtctgggattctatcctggtaatctggtatttgtccgcgagtcttgcgagctctatagtagttgaaatacgcttcttggtgtctttggtatcaatcttgacaaaacggaggtatagccattgaaggagggcttcaaggctttgcttagagacaacgccttccatttcttctaggtccactgtctactcttgggcctctcgaaaatgaccttcgaacatggctgtgaaaactggcgactccgcgcagaggagtcctttggaaattgtgtattcacaaccaatagattggattcggattttaacaacaggaccatgatagagtggaagcgttctaggtaatggagtgttagacagcgtggaagccactcccgagttaaagcctacttacgctgttgcgaaggacccagcatcttcctcatatatctcactcattttcctcttcatagattgactgtttgaaagaccggtgttgcaaaggagaatgttaacgaaagatatggagatggctttgtgatctaagcaaagagagaaggctggaggaagctacttaaacatctgtacctgacaaacaaggaaacaaaggcaccaggccaatctcagcaccaactgccaacgaattcctccaatttcaaactcatagattccctagatctcacacttcaccccagtatctgcccaacttccttctttttcccgctaaaacggtccgtgaccataaacgccaacgcagcgtaactcagtgtactattgctagaagtggatgtgtaatccagatattaaattttctatctaaaattctttagatatggtatagtaattccgatacatagtttgaatttgtacggagtacgcgtacagccttggcatgtgcccctggttggccgcgtggatgatgggcggtttctctggagataaggaagttaagggtaggattgaggctcaggataaggatgattattcgcaagggaaagggggatgaggggttatgaagggatatgcaatataggatcctagaaaactacgcaaggggtgacttcagcaccgccttcgaaggtctcgacccaaacccaacttaaaagtctaggggtctacgtacttatgactatgaccgtagtgagacttatattacagtattatacagcgagatccaaaatcaagttgagtttcattgtccaagtaggaagtaagtacaaggtacgttgagcgcgagcaaagaattgtaagcgtagagattgttggatagcatccagagaatgaaaaacgagtgagacggaagaccacaagcataagaaagactagatgacagacatacaaatgccgacacgaggcagatgcagtaacgagtggaatagataagagagatgaaaaggaaaagacgagaagaaagcagaatgacaactttcacgtaatcaagctcatacacggtgttagatgacatatatgaacatcaaatagtaagtgtgagcgaggggtattggcaacatgtgcgtatcaacggggtgaacagctttttcaaaagcggaaatatggaaatttgaaaaggaaataaaagagatatgggcatgtatgagtgagagcgtaagagtcagtgagataggaaaaaggagagatgcgtgggagtatcggtgattaagtaaagatcagattgctaaaaggggaaaaagaaagagaggcaggagagatcgagaaccggctcgatttagtgagaccgacgaccgcccatgtaagagccggtcgcggaggcaaggaagcgagccacgaagccgccgctgtgcgcgtggttgctggtcttcagcttcttggatggctggcggataggctccgaggacttggtggattcgatgtgggcgacgtccacgtagctgtggttcagtgagagggatgacgggctgcggttggggtccgcgagcatgaggtcgtcggcaccgttcgaggaaaccgtactgatggaagctggtgtgcctcttgagcttggggcgatgctggacgagcgcgagcagagagagttgaaggtctcggcgtgggagagggctggcacgtcgccgacggatggtggggagacagagcgggtggttcggctgggggatgcacgctggcgttggtaggggttgtagcgatcgtgctcggcgatattctgtgcggcgtagtgggtgttgtgcatgcttgggcaggagacgtggctagggagacggcggagagagttgtcgtttccgcgacgcgtctcgctccgggcctcgagcttttgacggcggagtcggctggccagtaggtctgctgatgagtgaagacggcgcctaggggtgggttagtatttgttatgataacaggttgtaaaatgggatgctgtaccactcgcggtgttgctcttgtttgtggagatattcctcatcggcgatacgttcttgctcttgggctatcaagcgctggcggtgggggacgagaaaaggctcgaaataagtgaagagatcctgctcggtgatgcgcaggtcccagtccagaaggaagaggagctggcgttccatgaggttgacctcagggagagagaagccgaaaccttcgaatcccttcactgcagtgtaacgggcccaatgcttgttcttgggactggagtcgttcagatttttggcggccaggatgagcgaggcgaggaagatgcgatggacagtgcagcgcatgccctttgcgactggtggcagacgtgatcgaagacgaccgaggtagacgagacagctcatgagagtgggcacctgcacctgcgaccgagcaacaagtgacgcgataaaggtctcgatcgggggaagagcaggcaggtcagaggggtccattggaggggtggatggtggtgtaggttggccattctggttgaccgtgttggtcacatgcgcctcacagcggatgacctgggctgcctgttgagccaggtgtgtgatcatttcgcgagtcactcggacagtgacaaactcattgagagcagctcggttgagtgatgctgagtccatcttgatagagggatatgacaagaagttggatatcggagaagagatcgaggatgggagttaaatatgcggaactgagatcaaaaaggtgatcaaggccacagatagattgtctcgggacaatccaattcagaaatctttgggcaaacgacaaaggtctttgtatgttggcggtatcagagggagtcgacacagggtgaagcaaagaaatccgatcaaagaccaagagacacaatggcgaacagagaaagtgaattcctggccggcaggataactttcagatcaagtactttctttaaaaaaagaatgttgcagtaaggatgggatagttggggttgtcgtgtcaacgcctatcgatagccctaactgagaacttctccaaagtgaaacccgaaatttattcgagagagacacaatccacagttcactgcaagtaagcaatagattggaaataatgtctctgaggggggaaattcaggatagaaaaggcgaaggatcaaaataaaaggcaggtatcaaaggaaaggatgacgacgttgggcatgatgaatctcgtgaagaatctgggtggaatgcctctctagttatagtatctggtatgcgccagagtgggaggagagaggggatacggttctcccctgcaaggaacggccatccagttagaagagagaagatagccaacagggatagaacagagccaacctgcatagttggatctaagatgctacctatttttttggcgcgcggagtctgacagggaaagtgagctgatttgtcgagagagaacggatgatgtacagttgatagactattattgtacctgtgcgttattatccctagattcatccaatagagggttggacggttggtttttggctgttggattgcatcgactggctggacacgatggactcggtgtgatagtattctacattctacatgaaactaaaataaggggcgtattgggacagggcgacgtccaacaatacagctgatctaggatctagaatatgggcccttcacaatgattcctatgaaacgcatgaccgtctcagatctactccgtatgggtcattccattccataccaaaataggatctattatctagtcaatcatcaccaagaacagacttcagctgaaaaaaacacggtggcgatttcaggttggcgccgtgaactcgcgttagtgcccaatcactcgaaacctgtcagtttccgatctgatcgccggaatccctgtgaaatggtccctttgacagacttggctgtcctgtcatttgactggatcccaatccaacggcgcgaatatagcgtgttcgagggggagacatgccactcctggaggggaaaaagaaaataaaacgatcccaacctgttggaattatccgacatccacctcacatgaggcaggtcacatcattccggacccttttttcttttttcctcttggatctatcgatttccaacctcttcccaaccacccggctatcttttgcctctccccgaccatgcagtagagccgtgggatgcatgcaatgttccgtgcatagctcttttagcgtgttggctactctaaaaaaaaaggcagcacactgcatatgcatctacataagcgcccatcctctttccactcccgacttcccgcccagcgcttacaatcccaacatcgtggaagcgctatgacgtttagctctaattttatcattttctttcgttattcttagatttgtttctatacgcactacgctcctgcttttcactaccccggacgtccccatgcgcgggccgtcacccgccgttccgcctgtcccgaatttgggatgctggaagtgatactgcgcctcatttcatcgggcgtctcgctgttggtgatttggatggttggttaagagtgctctatgcaggtttccaacgtttgttcccacgggtgctcccacgatcccgcaggtgatcccaaaggtgatccgcatatccagcccaggctccatcattttatggcgccgttgggattctcagagctttgggcccggtgttggaatggggcggtttcgggattggagggtttgtttcagtgttgggtggcggctagaaatcgtatgggtgagatgcaacgcgaagaatgcgaccgtgcatatgcggagtacgagtcgcaggctgatactaatgtgtgtatttggcattatgacaatggtggttctatgattggcagtgattatcgatccggtacttggtgaattgtgattgattacatttcccaactatcttcccaagtcccagtcatgcccttcgctaaaaccatggaatcacttgacaattaaacaacagcgaccgagtaagaagaaacagtcaacttagcagtaccagtgaaaggctcagtgccagcctgcacatcaatcaagtatttgctgttgctcagaccctggtcgttgacaaggtacgtaaagaacttcaacaggtcaccggagaagctcgtaacggtcgacttggcgacgaagctgtaaacagtcatctggccattgggaccaacccacacatcccattcgacaccattgatagtaaccgtcgcgatggccttgccagtgctcgagatcgggcccgcaccgcccagagccgcaagccacaccatgatctcgtactcctcgctgccgtcagcagtagaactgagaaacatgtcgtaagcgacatcggcgacgatatcggtagtcgagtagctattcagagatggttagggctgttcgttctaaagaaaccatgtgcaccaggcttacctccagtcccaaacggactcgatgctgctaatagcactcagcgtcttaggagtgaactgcagcgaggcactggcgtagctcttgacctggttcgtggcaccggcccacgaccacgaggtgtgccacgcgatcttactgccgctgctcgagtctagccctgtgcactgcgtgccggaggggtcttgggcttcgttccagaggttgttgtagaggatgtaggtgtccgttgtggttgtgccccactgatcgcagaagtctgcgcgacgagcgatggccttgactggggccctggcggcgttgcccatggccgacagtcccaggcagaggagggacacgggtgcgatgaaggacttcatagtggctttgggatcgggtgttggtctcagggacagatgggagtatcttggtatgaaattggagtctcacaggatggaactggggttggagggttgttttatacatgccatattctctcgggaggcgtccgtttggggaatgacctgcaccggcggtggattcatgttccgtatagagtgcggaggactcctgtctcacatttcatattggtacgagttattatctccgtcgagctcatggccgggactccacaacagccggataatatcaaaagcttgctcggggccacggccagccgggattgaaggaatatattgctgctgccatgacgtgcatcgtggacaaatttttccacgactcgaggtttattatgcagggcattatctactcatctgcggattcggaaagctctccggtcgttggcaccgtacgtgaggccgtcgcagagcggggcgggggattactgcttctagaacgcggtcaaatcggaggccgttgcttaaaaggtatccgctttgttcgagattcccctgaagcataaattgtcggtttgcatttgcgaagtttttccgtggtgtgactggctttgtgcaggagccaggtcagtgtaattgatttgcgtgtcatatgtgatggtcaaatctagagacttgaaggatacatatgctgtatgtactcacgaatcagctacatcgtcacttacgcctgttcttcatgcaccccgcaaacaacacaacataagactccccagaaaatggatggtagctaactccaaaggtctcggctgaggacttgctcctagtcagagattgcgggatgccgaccgtttttcaatgggagatgatcgacattttgaccgttgaattcaagtcatgcagaaaccaaattagaatggttcttgccatcattcgacaggggatggtttcatggcaagccacgtagctcaagtatggatgttacacattcgtacgcgctcacagtcaggcactataaggtatgttctgtctagcagtcccctgcatcttcggaaattgaaaatgggccgattgggacgaggactcagacggagaggcaattgtggctaccgtcatgagcaagtcagaaaacccgaaactcatggctgtttatcttacacggtgcaatcattttgcttgcgacttttcctttcagctatgtcgtggtcatataggcaagggtcggtccgtcagcatagcgcaggtcctcgtcattttggatatcatcccaagtcaactttagataattagcttctctgatatcacacaaacaattcaagcttggattcgatacattcatcgatatacggtggactctagtcgagattagatatgtatgttgtacaatgttcagaatatatatatcgtctcaatccaggtcaaacctcgggatacccatctcccatctctttatactgatagaaacagtcaaactagccatgtgtcctagcatcgacagtccgtcatatgcaagcataccaagttcaatgtttaagaatctgagcaacaggatgacctcggggagtagtttgatatatcttggcatcgggttccgcggactgcggcagttcccgcatacggatcacggcgatccgaggtgagctgtcattggagatgattggactgtcctacctgacaggtgcagacgtacggaacatcgtcggggaaaggagatatcgaggacgcttggccaatagaagagacaataattcggattgtgggcatccggcatggcctgttgatgtaaaacaaacagtgcaaacacatacaaacatatacaaacacattcaaacactacaaaccataggattgcaatatcaccagcatataggtgcatgtattgacttaagcatgagacaatgagcaaggaattgactgatatacagtagtaatgaatcgaacaaaagcgagggcgttttgactattttcaattgttttgcttatatgccccactaagtggaactccggggatttcgctagggggtggaattaaatttaagtgctcgcatgcctcttttttcaaagactccaggtcccttccccaattcccaagatgccttctaaatcctcaaagtcttccagctccggctgccgctgtcgctgcttctccctgaagagcctcagctacctggctatcttcctggctctattctccgccgtctaccgataccttgatgcgcgcctggagcaattctacatcttcgacccggtgcacctacacgatgtatctcagcgcgctatcagcgcccacggcgaagacacccgctctgtcgtcaactttatcgtcgccgagctggagcaaaaagtcggtcccaactacctaagcacccaggaggagtgggttttcaacaacgccggcggcgccatgggcgctatgtacgtgattcatgctagtatcacagagtacctaatcatcttcggtgagtttcgcgcccgcgatcaagtctactgcattccttttcccttctaatcgcattcaatcttcgcaggcaccgctatcggaaccgaaggccacaccggccgccacaccgccgacgactacttccacatccttcagggcacccagctcgcctactcccccggagagttcaagccggaggtctacccggccggcagtgtgcaccacctagtccgcggcgaggtcaagcagtacaagatggatgaatcttgcttcgcgctcgagtacgcccgtggctggatcccccccatgctcttcttcggttacgccgataccttctccagcaccctggacttcccgacgttatgggctaccacgcgcatcacagcccgagagatggtcggcaacttgttacagttgaagctataattgagcatatgattttattattggcatgcagggttcagttggattgatgaggtctatgtggaatgtatgatatgggaattggggtgcgatcctagcacctgaggtgctattttggtaaaagttagtagatatagtggatattcaattgctagcaccgagcacatttttaataacatcatcagctgactgcccttatgacacaggctattagacttgagctgtgacctaggacgctttgcccaggctgctgccgttgaaaagatgttggaagtatggaagccaatattccaacgtcgtactaatcatcagtagacggtgagagacctgatgtcttaatcatttgagaagatccccaagtcctgaagttcagtactacttccaacgacggttcactagagctacggaggccgtgatcgaggtcgaagatataccgaggacgagaatggaaataacagaagaaggctgagataagcctttataccttgtttgtcaggcttccacaggcttgggccttagttaacagccaaaaacgtatctttgttaggaaccctgcacgaacaagcctatcatgagcgttgacatttgcctaggctactaatatgcatgaatccgcatactcgtatgccacgtcacagagagcactcagccgatgtgtgcgtgtgttgctagcttccaagtgttccatcgaaactacgctgaccattcccatttctctcactgatgcaatcttctaacatctgttactaggccatatgctcatggttgctcgagcaaaatgataccctcgaaggaatttcatcaagcagttcaaaacctacgcggactaacggatcaaccatccgaagaacactcttatcgaatagaaattccaccttctcaatcagctaagcacttgctaaaagctgaggatgagatgcaacttgccgatgatattgccttcctaggtcaggcagaagagggagccaaaaatgtgacggctgtgactctccaggagaaagcacctgggcttgtcatttgcctcgcgagcaaccacacgccatccgataaaagagttctggaattgaataaaaccatggctttggtgagcgagtacgcttctgaaggtagctccttgtatgcaaatgtcatattcagggttgctgacttgtacaggaaagcgacggcgtgaatttcgtgacaaaatattcgacatggttgttgacatccgcgaagatcgaattcttagcagaattcgtccgccatggttaccacagcctagccgctattacaaactgaggccgtttctactctcacaggttcaggtatttgttgatgagatttccgttatcaatcgtcagtcagcaggttttcaatctctggtgcaaccggcgcgccagctgatatcctgccttttacctttcaaaaaacctgttccacagattttgagaaaggaatatcagaaaaatgtgataaaaagctgtgctgaattggctggtgttggtgggacaggattgctggaggaacaccttcagcggctacaaatttcagctcaactccgtgatagaggtggaatacgtcaaattgacaagcttgcgcgatacttctttgtgtgtcgagatcttgtcagagtcggtagacgtccagagtacaagcccctgttcagcaatattgcgattgaaaccttgaaagcttccaaaggaaggccagtaggctccaaagtgtgctttgttcacgcagagatgcagcagattgttcactacacgaatcatcctcatgatcctagtccgcggtttatcggatgtagcaagtccgcatgctacctctgcgatatgttcatccagaagcatgggttataccgaatctcacatgctcaccggcggctttatgacctatggacactgcctgatttggattattcggcttccaaagaggctcaacagcttcaagtcatattaaaatccatgaccaaggagatttcagccattgccacagggtttcaacgaagtcctcgtcctccgaagcagtatagagcggagagcattgcattcttacctcttaccagtggctcgacagcgagcaatacttcagttgccacgcagaaagcttccatgtcttcagtatcccccctattgagtcttaagtcggactctgataccaggattgcgagcacctgcttttcgaagagcctgtctagcagaactagcaatgcgtcttgtcttttactcaaccaagatgacctgccatattcacttgatataaaagacatcaaacacgactttttggtgcagatcggtgcaatctttcttgatgtcgagtttgttaccactggccggctctcaatccgccacgcaatagataatacactacctaaagatgtcatagatatctctcatttatctacaattagtgagacaaaggtggctcaaagtctaaccacgcaactatccttgcgtcaccctagcggttttacgataattattgactttgtccgggatgaggttggacttgatcacgaaacagtcattcctgtgcgtccggatgactaggtctattgaaggttacaattcggaatactgtctatatagcctgctagtaacaataacatggtgaacctctatcatgattggttacaacgagtctaaatcagcctttcctcggccatgaatcgcttgcaaatccaagctactcactcatctccccaagaagatcctgcgcattatgaagcaagattcgtctcgttgtctctgatccaaagacactctgcaatccatcatccactctcttagccagagactcagccaacgctgcaggggtataggggtaatcactcccatacagcaatctagacgaatcaaccagccgcagaagaccatgaatctgatccgggaatggcacacccgcaagatcaaaatagaaacgcgtccgtaacagctgcttaatcctctccccactaatcccatcccctggaccgggaaccatggacgagaactctgcgatcctttccattatcggaggaaaagtcgcaccgcagtggcaagacacaaatgtaattccaggacagcggtcaacggtcccagaggtaagcagactcatgagtgccctggtcgaatcgaacataaactccataataggcgccgagaccccagggagcggtatctccttctccagggagtcatcatcgtgccggataaaacatgtagttgggtgaaagaaggcgatggtctttcgcgcactcaatttgtcaaaaacccgggtaaagcgctgatcacccgggtagatgccatgcgaattggtcagaatctgaaaccccactgcgccaagatggtccagtgcatagtctatttctgcaagggagccttccacgtctgggagggggagagaggcgaagaagaggaagtgggttgggtgatcggcgcagattttggacatgtcgatgttggcccgtcgggttacagatcggccttcttcgtcatttcctggggttaaatgtgttgctggagaggacatgctcagcactgatttcttgatttttagctggttcattagttcaatgtgtgcttcgggactccattcctgaattcttgtatttagtgtgaaagttagatggttgttcccgttcaggcactcactgggatcgccggcattccatctgggtgacctctgcccgcgaagtcgctctgtaggcaatactcgcgataagagggtggtacgcagtgggtgtggatatcgattttctccattttcgatctggtgagtgtatagggagtattttctgggggattgttgctgagttcatgtatgcctgccactgagatcgacatgcctagttcgtattcttcaccggttgttcaaacagtcacttattggttactgactcgaggcaacgacaaggaagcatgtcgtgtgaccatctccttcttattgccaatgctgtggaacaatgaaaccaacagcctggtttggcaaactgtatatctttagaccgaaacgaggtctagactaatgactatatcaggtctactttcggcagttccttcggtacgacaatcaatcccctggcagccaacagccgggcctgggtgagcttcaggaaccgatacgtgttatccaagatcggcgtgtgaacacccttctccctcgccacacgcaaagcattccccagaatgacctccacctccatgggatttcccttatccacgtccactagcatactaggccggaaacacaactcgagaggagtagcatcaaccatctcatccacaatccccgggccaaggtcatacccatccgccttcgcaatggccgccatctccgccataccgggtcttatcaaactatactcgccgccgaatagccggactgcagcactgtcaagctgagtgagagcgcacatgggattgaaaatcccattccaaagcaccttgcgccagcgatagaagacgatgtcatcgacaacattcgcatcgacgactttgctgctgttataaatcgtcgcaaactcttcgagcttggcgcgctcaaacgccgcgtccacggatgggttgcggaatgcgccaatgtggaatttgtcgtggtcgtcgtgtaccacatgcccgttgtgttcatgtgcgccgatgaaactcggcgctgacaacaccacgttctcggggaatgctgcgatgatcggtggttcgatatacagaccgttttggaataggacgatcgttgtatgacctggagttatggctggagctatgatcttgggggtgttgttcacttcggggatgttcttcatcgtgacgatcacatagtcgaatggggcgttgggatcacccaagggaaccgcgttgacgactatctatgtgttagcttcgactggaccgggcaagctatttctcgcctcgcgactttgcgaggatacatacttgcgcttggtctccaggctgatagttttccgtggtcgatagactcgatttcgaatccatgcttgacgacttgttcatagttggaacgaagaacagacgtgacagatgcctgaccggatctttcgagggcgacgctgaccatcgtccccacaccacctgatccaatcaccaacactcggcgctttgccgtggtagtatcggacatgtttgatgattactcttgaggagacagtgtcgagaatttccagtcgatctgctacagagttaagataaaatgggacatttctccaaatacaacaccccaccgaggccgatttatgcaatgcgggaggccgatctcggggcatttgattatctcggcatctcctgatcttatcgacattctaccgctcactggatgacaaggccgagctcccttcatggcccgatttggttattctgtgacatttgaaatgagggataaactatacaagctaatgttccaccatggaacgcgcaaaccatattcgcagcaactgatcggatgataaaaagtgatgtgaaatgtcgaatctttcaaaccaccgccaattatcttccatgtatccccaaagcaacccgagatgaagaacctagtcaagcaaatccgattccccgcgctcgaggacatcctcagcttcgcacaaaatgtcgcagaaacctcgggccgatgggtcaactggcagatcatacggggcatgcgacatgtatggtgggagacggactgggacgtgctatcccgatgggcgcaatcgatcatcgaaacagaagagcgcctgcgcgaaatcacccaacgcgagacgttcgtcaagaagaatatccatagattccacaacggctccgacgaagcagccaaattggttctgccggatttcatcgaagagctgatcgctctggaccacgagtacacgcgcctcgagcggatatacgataccctcctagcgggctgtcccgtgggccctatcaagagcggatatctgtggattcgaaagcagccgcagtggcatctcaggaatgagtggttgcgccaggattgtgcgaggcgcggtgggtgctgtggtcgtcagtgcaaatgttgtgagaaaccgcccgatccgatgaggaagaagggctggggtcattgtacggcgaagtgtgcttgttgtaatgatgtgcttgaggacggatttcgactgaccgagagaaatcggagaacattgcagccggagtttgatcttactgtttacccgtggagtgattatagtcgagagatgtttcgtgcttatatctggtcgcttgaataggctttctaatagtttgctttgaaagggtgttgcttgaatgtccgttgctctgtataatcaaatgccgctttcctcttatcaatgtcctagaatagaactagcattttgcaggggttcgagacttagcttgaaacaaaagtcgaagataccatacctagagttgcaggtccatgcgaatcaaagataatcaaatgatcagcggggaagcttcctaaaatctcgccaagccggcatgtttaacgcatcctgattcgaccgagtagttaatatcagagccacttggagagtacactgggagtttccccgcagatgatattcacacttgataaggcggatctgcgtaagtgtaaggcactgattgcttaaataggcaggatcaccttgcccatcatgctcgctcaagtatcctttcctacagtatccaactctcaactatggagagtgacagtattcaggatgagaccatttgggctccaggaacagtcaggctagaagatagtaagtgaccgccaaccataccgatacaacttgacttacagagccagtccaccaatccagagaccaactggtactattccccacgccatcagccgaccccaacgatcctcttaattggtcgacagctcgcaaagccctcaacttcaccctagtaagcttctttgtgctatggacttttgtccaactcgatatcggcttcacagcatggggcccaatgcaagacgagctcaacttctcagtcgatctactaaacgccaacgcagcggtcaattacggcggtcttgctataggctgcatattctttatgcccctggtccacaagtacggccgacgcccaatctacatattcagcgtggccttacaactcgcatcatccatctggcaagccgagatgtacacgatcggcgatctaatgggtagcggcctgatatccggcatcggcggcgcaatcagcgagatcgttgtgcagattaccatcgcggacatgttcttcgtgcaccagcacgccactatgaacggctggtatgtcgtcgtccagtgtgcaggagcattccttggccccgtggcatcggggtacatcgtggtggcacaagggtggaggtggatgtggtggtggtgtgtcattttcttcggtgtcacactcctctgtgtggtattccttttcgaggaatcgaaatatgtcccttatttggatggtcgggagtttaccgcggatgtacaagtgaccgatgaaccgtccaaatcacgcaaagatagggacgcagcagatgcaaagagcgccaatgagacgatcgctagccccgtacataccaacccggatattccgatgaagacgtattttcagcggatggctttggtgaccatcaccaacgaagctctgtggccgcatttttatcaaccaatcgtggcgctctttaccttcccggccgtttcatatgcagctatcacatacggatctatgctgagctggttcgcgatcatgacttccttacaggcatcgtacatgatcataccgccttataacttcgatgccattggcgttgggctgatgaatgtggctccatttgttggcgctcttctaggtttcccctttggtggacatttaagcgataaatctattttatggttatccaaacgcaatggcggtatttacgaaccggagatgcgtctttggcttgctctacctcttgccattattggccccgcggggatactaatgttcggtttgggccttgcctatgtgagtatatccaaagcatgccgtttgaacattctaacgttatctagggtgtgcactgggctcttcttgccgtgggatttggattctttggatttacacttgcttcaattagcggtatcaccctctcgtatctcatggattgctatcaagacgtgagtactgatcttatttcgagcgtttgggtcctcttctaatttgagcgcttctagatcattagcgacgcattagtcggagtgatttttatgcgaaatatcttctcggtggttgtactctttgctttgacaccttgggtcgaagggatgggcttgcgagacttgcatattctgcttgcagttattgcattggtggtcctgttgattcctgttccacttcttgtctggggtaagaaggctagaattgctacggccgcgagttataggaaaatggcggcaaatcagctcagccaccggactacttagataccctcctactactagaataaattgcgactcggctttcagttgaaggagacgaccttgacaaatattaagtaatgttataatttagacaagcccataaaaataagactaaaggtgtataatgttaatgaaggtatcacaaagaagaatgtaaacgagtgtttcaatgtgttcctgtttcgcctgactcccccaccctatgcaatccgcatagagccttccatccagcgaaggagtcccagacctagacgctttccctcggcttctcatccttgtagtcttcatatcgaggcatctcaaatgtttgccgaaccgcataggagacactttgcttatggttggaagtgatagtgcctccaggattgctcgagaccacaagagtcctgtcggacagctcggatacgttgttggaggcacgaatttgagaccagaagttgcgatgactcaacttgaacaaagggcggaggttggggagacaagcagccgtgattccgactgctgcttcgatacaggtccacacgatgacgggaacttggttatctgaacatgtggttagagatatggatcgagagattgaaagaatattggcacggtcgatactcacaggtaatatcaggacctagctcaaccagtcggatcatggcattgaggcggaagatatcgaaaatcaaggttctagacatgaattgttagtattctttcactgtagcgcgaatgggatatcaaacatacaagccaccgacgaggaatactccagagagaagcgctttctggccgtttgagatcggtaatgtccacacgactctcatgggcatgatcaagagaatgatgtcggagaggatgttggggatttggattccatagtagaattttgctgggtcaaggcaggctccttcaaccgactggtcccagaaccttttgacggggatacacagaagagcacctgcaacgtaaacacccacaacccagagagtgacgaatccaaacatgatgttcactgcaattgtcatgtgtcggactgcaaagagtcgcctgtacagtgccagaatggagtatttaatgaaggcgatgcagccggtgtagataaaggcattggcaaagccgagctatcttgagtcaatgcgtgtacttgatagtaatagggctgagttacgtacttggaagtaaaccacgaggtttttcgctgggatcattgtgatgtgtgaccccattccattgaacaggactaatatggtattagtatacgttggtttaatggggattttgattcactcacgaacgacgactccactggagcatgcatatttaaagaacagagcaaccataatcaagtagtcgtccatgaaaagcctactcccagtcaccttcctcgccaggatcctgagagcaacggagagagtcgacaacgtgtaagcaaacaccagggcaataatcatcgaccggcgtaactcctggttcgggtgttcgaagtctcctggtgtccacgtggggctggaggaatctggggaagacatgacaggcaggtatggtggatcaactcaaacaacaaggtaagattaaacgagaggaagttgttggcttgaatgatttggaatcatttaaggctgcgtttcggttcctttaatatacttcgacaagatgaggaaggggaaaagggatctacgtatgtagcctggatatgtcatatcttttgacatccacgaaaataccgcaaagatgatatgaagggtataccgatcacatcgatgacagggtatttgctaggtacggaaggcagttcagctcaggcaccctccaatgcgaacgactactgattgtagtgtgcgactattttgccttagaaaaagctagccgatgttaatcaacggcccgtcggatcataaagcaacaaagcattgtataccttggccgtggagatttcaccaatcatatggaggccaaagaaccctttccggacgtatcatcttggaagagtggatatatcagattcggatctgacactcatgagatccactttatgcaagttatttttttccgaaagcccggcgaatagatgtgttgaacaaaatgacagcatgttctagcgcattacgtctttgatcgagataatcactagagatatgcgtgaagaatgattgttcattgctttgcagtcaagttctcatactagaagattactcaacgaagttcggaattcatcactatatttcaagcaagggattaacaataaagaagtctacgcagttttgagatatagataaaccggggctgagtttcccagggctctatcgtaggagaattcagaaatagagacatacacggaatatctggctttctccatatgtaccacgcccaatgtagccaaaaacgccgaaaccgccatgatcgtccaataattgaaaacaatgcgggttgggccatagaatacagatttgaagccaccgttttggcagatccacgtataatgagacagttgaggtctggggttgacccgatatgatatgtctaaagcacagcagacatatccgattgcggcccacatggtggcatttagtggaattcagccgttatgttggtccacatgacagcgcttttgccattgattacgaagttgatatacgtctcatgcagctattgcactgccgttgcacttcgattgcacatctgtacccgcttttcctggactgtcgcacatgaatacgatgttaaatgcgatctcaattggaatttaatacgttgttcatgcacagttttgtgcaacatatgttgtacagcctgattgtcgatggaagatgttatgaatccactttttactccgcacagatatccccgatcttcgcgaggggctgtatcggagattagcccgatcgaacgtccgactcttcacagagctgagagcatgtcattggaaggtccacatgggtatattacgtcttcatagtttatgttcacccttgccgttctgtggctcaatgtcctcgacaaagttcgacggaaagtctaacatcccggatttgcaatgcctcaaatttatatatactttgatcgtcccggctgactctaggaagcaggtataatccaaaacagttagcatattccaagctatccacactacgagcaaggcacatacccatagtaacacgtagggccattccattgaacagcacacgagggaaagtcgcacacatatttgtagctgccgtggtccagattctgacctgcagctttattatccgcaagggtgacgacactatcaatgtttcagagccgcaatgtgtctttccagggttgcacctttccatgactcgggaagatccctgtcccacaaccctttctagtggtatcattggatgctgaggcaatgtttgctgcgtctggctccactacggggctacggtaaagtgattacccttccggtccaattgttgacgccgatagcaatcgacttgggcatggacccttccaataaacagacgcgatgctttagatgcacgccatcgacgattagcgtcaagccgcaggatcgatcgaagaaatgcccctcaccagaaatattccatctccgaagctctcccactaaaatatcgttattctagtacaaatcctacgcgatcatggccaaagtcgctcttattaccggcggtagtatgtagctttctatcctcggatcattcattcactaagtttattgaaaaaagctagcggaatggggcttgcagttgccaaggacctgagccagaccggcagctggcaggtcaacattatcggcaccaaccaggagcgaggccaagaagcagcagcttccttgttaaatgtcacattctaccaagccgacgtgcgcaattaccaacaactagccgctgtatttgaccagatcttcaatgccactgaccgaatagactttgtcttcgcgaacgccggaagagcagattataccgatttcttcgctaaatccgagaccggcatcccgcccgaaccgggttctgaacttgtcgatgtcaacgtgaacggcgctctatataccagttaccttgcgatgcactatttccgtcgctctccagagttaacgaaagggcataggaatttaatactcatgtcgagtatcgggggactgtacccctgcatgttgaccccggtgtactctagcactaaacgtatgttgagaattaacaactcgaataagttcgccatcagacatggctaataagttcctagatgcgctcattgggctcactcgctctgtcggagagcgactttgggaagatggaattcgggttaatgctctgtgtcccggggtggtggaaacgccccttcttgccaacgaggcgtttaatgcgatcttcccgcgggaaatactcattcctatagacgttgtaactggtgtggtatcagagctactgtctggggcagatatggtagacgccaaagggatgcgtgtcgctggtgatgaaatgcattcccgggcgcttcatgtttcaggaaagagcttccttttcattgagaagcccgagtttcatgatgcgcagtctcggataacttgggctgcaatgatggggcataaataattggaagcataaatgtacgagacccaatgaactcgagataaggtcccaagactgtatgtcgccgttttaacatttgatcgctctatatcctgcctatctggttccacagaattcacgttcaacactcggaatgttgaaacacctgatgcacatgtttaaactcaatttccttgcaaatccctggcaggtagaagatcccccatgccataagaacaactgccgtctgatagtagtcaaatgcataactgggccactcattgactgccaaaaatccatcggatcccatcccaagctgtgtcagtcgcatcaaattgcgaccaatagcaataatcgagattgcaagaccaaacaactgattataaagtttccaatgaggcatcatgagttggatattggcgaacgagggtcgtccaaatcgaacagtccagaatatattctccacaagagtgaatatccaaaaaaccatctggcatacataactcgccgtgagaatattcgctgcagactcaatgagtgtagccttatgggtcagagcaagaatcatagcaccggtgccctgaagtagaaaaaggacaatgttggaagcgaggtagatagggagtcgtaattgggtagggagcagacccagattctcggacttcaaacagcgcatcattttcacttgtgtgagattgacggtaaacatgcatagcgttggtccaaggaggagaaacagattttgaacgccgtaggctccaaagctataggcatcttctgaggagaacactcgagcccctagacccattgcttgcactatggagtggtgagcgggagaatatctcaatcgggctgggttgttccttacccagagctgctaccagcatatagctaccatcccatgctcgagagcgacacatacggaccgcatgcgttgcaaacagggcgcaatatatacccactccaacaaccgcaggaatcagacttggcgtataggaataataggcggttgaagacatcatattaggaaggatatatcaaacaaagaccaattggctcttgaagatgtaagtaagttgtaatgaaagcgagcatcactgaaaaatccggaacccccatggcatttataacattggaccccgagtaggggaccaccaactcgatgcagatcagatctaaaccgagtaatcataacatagctctttatggcagcctaggggcccttgtgaaagattatttctacgacgtgcaatgtctcggcgaagggtcgggttcgtactcgggttcggaaaggaaaggttaatctaccttatttcctggcatttctcaaggcaggtacattatagttggggctaatctattctcaattgtgaaggcaccaatcaaacctatcctttttgctactcttttctaaaagaggactacccagtatgttagcgtctcaaattagtgacatactcattcttcagtaatattgaagatcaagctgtttaggcatgagatgatcacctccttccaattaaaatatactataagacaataattaagacacgctcctgtcgtgcagcgaagaaaaaaattgagatcaatctcagcagttcaaatcatccgccatgcgcctccaaacagatttaggcagcctcccatgaatccaataaccaccatcattcccatcctgaccccgccctttccacgtcacaaccaaatcatccaagtgagtcttggtctgtcgcagaagtccgcagtagtcaacacttccctgtacaaagagcggacactcgccttcgatatcgagaccatagagcggtaggcttttccaagaagcgatgcgtggttgagccgcgcggctgccgtatgattttgggaccatgggtcttttcgtcgggtttttgtgctgagcgattatctctgcgatgcattctgattgctgcccttcgtgaaccgcacgccgaatgtgtgttgccagtcgaaccaatgaaggagagtcatattcgcttgttggtattggatccggcaggggcatcatgtaccaggggttggaaagatttgcctctgactggagttgttttgagatatcgatggttaagccgaagttgtgggcagtgtgtaagtgtaaagaagcctgtgcaggtattgtcttagtgaacttctccaatttggggcaaactgtatgacaggtagcatcactaaccttgtagataaaagccagcaagagatcatgttcagttaccttggcctgtttactttcggccgcttcaatccatctctggatttgccctcgggggaccaacaaggtcttgccgatccgtctcgctgaggggtagcatatatttcgcccaatctgtttcccgagggccgtaattcctgctatccaagtccgattcatggaatatttgtgcagatctgcgatccgatgacactcaatcttctccacgcatttttcgattacttctgttttcagcggcaagagtggtcgggcatggagactgtgggtaattttttctcccctgagcaggctacaataagcctgaactatttgatgagcacctataagcacctgtcagctctactggtttgtgctttatgctttctaaggcgtcaattaccatttgcatcgcaaagaggctgcaggaacttgaatcctattatgcaggcatcggtcaagaacaccgttcgtatggagaatacgcgctgcctccatgcatgcaagactccatacccaaaatctaacgccttatcgaatgcctcggagtcaatcaattgcggtgagtccggcttgggggaaacttggagaatctcgctgagctcttgcttaagaattttccctttccacacttcggctaggtcaccggggtctttcggatccaagaatttcgttttctgtttagtgttagtatgattaacgaccgtggttgacgttaccaagcacgtaccagcggatccattcgcaagttcagtacaggccattgtgacacgagtgtatcggcggcgaactgaaagtcgagcgggctaggactggtcctcacaacgattgacagagtgaactcgagaggtcgggcatagcccatatccagtggacttggcttcataatgaaatttacaaaaaaataacaaaataacacgagatccagtaaccatgcttatcaagccgacccaaaggttatattaataataaatagagacagagtgaggccgtcacggaaatcaacatgtcagtatctgcatattgatctgttgaccccaactttaacgtctctccccacataattgccctctggaatgccaccctgtggatctcctccaatgagcttcctgacatggaattctgcaccatggtagagacctctctggaatgttgtatgtccccacacagacctgcgtgtcgctcacaattgcccaaacttagcagcagtcttgttagaggagattggaaatgcgcgggcaggttgtccaccaatcgtagtcgaaggttgcagaaatattgactcctgtcattccctatacgaattccagctaatatcaagtatgatgttggttgtgatgaatcgattgtctgatactatcccgtgatgatggataccgggatcagccgagccactagccggccgttacatttttttacaaagttacagaccattttagtgtgtaacctttgtaataaatgtaacaaaccggttaaatcgtgactagcgtacggcggtcgaaaccgactctcctggcaacttcgaacatgcttgaaagttgacacctttggcacctctgaatggcttctctatctctgcctccacctggttttgacgtcggtattgaccggttttccagccttcctgtcgagcttctcatttgcatttcctcttacttgaccaatcgcgatctcaagtctctacgcttggcatgtagactcttggctcaagtcgctcatatccgtgtgaatcgtgtttttctctccgccaacccatgcaacatcagagtcttccgcacaatcgcagacgacgaagagttccggcatcatgtcaccgagatcgtatgggatgatgctcgttttatcgagggcccaaagccgcatccccaccccacaggggagattgatgaggcagacatagaccctgaccaaggatgcccctactggtttgtcgcggcatgtaaagagaacatacatgaccgaaatgtgcggaagacctacgacatagtgcggccagatgacgtcgcacggggaaaacaagttattacgcaactatcgctgaaaagctgctggcaattttaccagaatttgctccagcagcagaaagacgttcttttctcaaacagcgatgtagacgcgtttatctacggaatcgggcgattcccaaaattgaaacgaatcaccatcactcccgcagcgcacgggtggatccatgccccattatatgatacccctatgattaagtcctttccgtgtggatttaactacccgattccacggggatggccgacgtcgagagattcgcagattccgctacacgcccatccatggagagaagccactgaggaccggaagaaccaatggcgtgcattccgaaacgtggtatctgtgctcgcaaaaaataagctctatgtcccagaattggttcttgctgtcaatcagcttccgactgggcttaactgtactatctttgatcagccatgcgaggaatacgacaacctccttacaatactgcggagccctggattttgtcgtctagatcttccacttcttgtgggtgggcaagagcacgaagactggctctcattccggagcggttatcttaagcacgctttgtccgaggcaaagaatatgaagtacttcagtcttagaacaacagttgacaccgatgccatacgtgacatctcgggcaatcccacccacttcatcccactaaagactatcctccctgtggaggagtggccagaactccgttccttcagattatcgggtttcctagtgaagcagggtgacatgataaatttcctcgctggactgccgaagaccacatgtgttatcgaattgagtttccttgaattccttgatggttgctggcatggtctgctcactgaaatacgtgacacattatgttgggaccagcgagacaaggaatcaaggcccaaactcattattggtatagcggactcgatgcgcagggcaggatttggcatctggctcgacaacgaggtgcaagactttatttatggagatggaccgaaccctttttatcccaactatggcgactacctaggagcaggaagagtgggaacctgccgggatacatttgagccggggcgtccgcggcgtaatgtggatcgttttactatagctcggatggggtacttcatggcagagccgttcgctgacatgttgtagtatgtaactaactatagtctgctccatcgtaccttcgaacacatacacatcgttcggatccatatacaatgaacgtggcattgggaagaaactaactgataaaccgcttggtagaactatggatagaagaagttgtaaactgataggatttagactgtttctgccataagcagcagatgtgaccgcaatccgttcaacacaatctcgacctagaacttggtcctacgacatttgtgaaattgcgagaattgctaaggacaaggacaaattcttgactccccttgaacaccttgaaccttgagaacagaaccacttggcgaaatccagaaagcccagaaaacactaaagcactattgaccagccagcctctttcatacgtctcacgcgaaatttctcgcacgactcttttgtcgcgcgctttaggttctatatgactgatgaccaaccctctactcaatctctaccgtcaaacactattgagaccaaagcagcaaggtcctcgccaagggcctcgaaaccgaaaccccaaagggacagcagcggaggtggtgtgcggagaagtacgcggctgcaacaacgcgataaacaaaccaggcggtagttgggaacaggcccggttaacgaccgaggagacgactgcctgggactgcgactaggattctcctaatctccaccaaatggctcggtcgttcaagattattcgtactttgtttgcattctcgcaggagcggaccgttgggactgcaaagaggctaggcgttgaggagaatgagagatttttttttttgctgatcggtcgaagctttactctctgcgggtggctaagaagaaatatatggcctttttgctctgttattccggtagggaaagcctatagcgcacctagataagaggtttcaacatgaatgacacctgttgctaggagtgtagagcatagtaccgtgagcgacggaatcgttaataagtttgcttgttggaggcaaagattgacgagtgcttaatgacggaagttcatttgtgtcctttgcgaatcaaactgacggaggtatttggtgaaacttggaagtaaacaaaacgacataataaacaaaacaaacaatggcaagataacaaaacgcgaatcatatatgctcatacagaggcttcgaaacgtatatataaccatcaaacgttcccatcttgaggtagacctttctccgtcatcagcttattcagtgttgcggcatcaatccgctcatccatgtccgggtccagtagatcttgaacgatataactaagcgactcatcttgctgatctagctttagccgagcagccttgaccaggtcaatccactggagcatcgtatcgacagctttcatatggggtgactgatgtatgttcgtaatcaaccaatgcggtgttttctcaggcaagggaatgtggcctaatagccagagtatgacaatacccaaggcccacatgtcggatggcggtccacgtagcttccagtctagcaaaaactctggtggcagataccacggcgagccaccaccgggcgaaggattgccatcccagaagctgaggccgaaatcgatcaaaatggcaccccgatcagggctgtagaggatattgcctggcttaacatcgttgtgaacaattttattgccatggataaaagtaagtgccgaggccatatcagccaggatcttctgcgcatctgaggaatctccgatgaaaatgccactggcttgatgccgctgacaccagagtgattcggcttcgacgtgctcagtatatatactgtggaaccgggcgtcagatccgagcatgcgaagtatagccgactagtgagcagatcagttctgggaccaaatgaatggaacgaaagtacatacatgacttttgagagaagagtggatcgccgattcatgtatccaagattcagcagcccggattgcgtccctctcgtttctgccggtggttttgattactttgacaaccatgagcttgcctggcatacccgagtgctctgcctgccatacagacgaatttgcctgctctacaatagtcctgcatcgcgtgagccgatacccttcgtcgccagctccgacaaacatagtatcgccttttgcaagcttcacaagtgcgttaccagctgaaacaccctgcataccacgcgaaggctcaatcgctcggtatgtggattctctcgatttcaccctctttgacggtggaaagtcggatcctggcgcaggtcgtttagtggccgttttagcagttatctcccatgaagtccgcgggagtatctggaattcgacgagagttatgccattgatctcgatagcacaggaacctttgtataaaaaggcagggtctctcggcaaaactttcatagattccttatcaagccgcacgtcgagggtttcgaaaggacaggcattgtggagaatgagacgatcctcgcctggatccaagtacaagtgaaatctcatatcatgatgggtaagggtgcacccgacttgctcggcgttcggagccacaacgaggaccctggctgactcgcttttctctggacagtcacccagttggacttcgacccagttgtcatagcgcccggctcctttgtagggagatatatcgagctcaatgaccctgggatatagaataattctagctgtcggttcgttggacgtgatcgagtccagacgtagcatgctgaaatccaagtccatggattggtttcggcttgtttctagataaggataaggaggcgagaatgtctgggttggttctgtcaagctgggatgaactctcgttgagctagggccagcctctgtcgagatgggaccaaccgtcgatctaggatcaacttcagtcaaaggcaacgtagccacttcatcctctctgggctcctcagtgtcctcactttggcctgtctggccaagcttccgtttagacttggaattgagtgccattccgggaccgagaagctgctcgtaagcagagtatagaagtttgccatattattcgtattaccctctgatatatgtatgccgtgatttgcaacagaaccgaagcgccggcggagcgcccacggaaataaaccaggcacatatgcatgcacaatccaacttgccgctaggtatagtagaccgagattgagggcctatagactaaatatagccgtgcatggccatgtcagcactaagcttgagcgtcttagattggccgaagcccatggctgaggcgccaaactggtttcgagtataaatagaatgtcatttgattctgcaatgttaattcgatcgagtccaggcggtgagtacgttgttctccgcccttttagtgtggggcccctgggagggaatggggggcttgcccatatcataacataaatcagtaactatagcaagagatattatctttactacctcctccatggctaagcggtggcatcggacaatagacactcatctgggggctcatactcctcctgacccaaattattacgaaaaaacgtggtgctgggagtcctcgagagtcggctacaaggatcccaacgttctttttaccacactacatgaggaatacaacactctaaagtgcgcgattcaagacccggaggcttggcatcgcgacgtctcttgcattgcgagggcttcgaataacaacgatgaattcctaactctgcttaaacagcgacaagcagagaggtttcacgagatccagacaacctggcaaaagatcaaaacacggttaattacggatcctgcacgttgggacaacccgccaaccaaagctgttttatggagcaattttctacaatttgctcgaaatttttcatacgattgcctcgtcacctgctttggcgcctacgcgactgatgcccaaccctctgctcaacctctgctatcaaattccattgaggtccacccttctaaagtgcaaaagctcaaaagagaaccaaaagagaaaatggcagcatcctctggcgtgaccaagtcctcgccaaaagcctcgaaatcgagaccgaaatcgagaccgaaacgggacggcagcagacaggacggtgtgcggagaagtactcggttacaacaacgcgctgaacaatccaagcgacagtgtgcaggacgcacctctcttgaggaaaaactgaacaaggctgaaagaagatttgcttcattgcagcctggaattgtggactaaggccactgttcccagggaatctctcccctcccattgcattgggtgatacatagtcctctctagtatgcccggtcttggctgctatgcatcggatatgcccagtaggatgggactggttcttttgtttctgccttggccattatatacgtttacactgtgtccattccaagcatgtgtactttgattactttgaactatcagacctgttggcgtaatgattctcttgacaaacagcacagattgactccgctaaatgaatttggttttataacaattcttggtttataggcatctaatgacatagatcaatgtgataagtggtgcagtcatctcgtaccagtctgatgatattaaggtaatcaggctactcggcgtaaaaataagatattctgacttcatttaagccgtttaaccctccagactggcaaagaccgaggatcgagataatatagatctaaccatggaacccacagacttagcgccctgtgcacggaccactcgatcgaccgcgggggaaaataaattcttctccgccaccaactcacaggcccaaccaattcatcatggcaccgacggcgtgtttcaactgcaaagaggcgcgagccgtcatcatccggcctaagaataggcacaaactctgccgtgcgtgtttcatcgatattttcgagaccgaggtacacgaaaccatcatcggcaccaatctcttcttccccggcgagcgagtagcgatcggggccagcggcggcaaagacagcacagtacttgcagcagtactaaaaaccctcaacgagcgatataactacgggctagacctatgcctactgtcaatcgacgagggcatccgtggttatcgcgatgacagtctcgagaccgtgaagcgcaacgccgtgcaatacgagatgccacttgatatccttggatacagcgaactctacggctggacgatggaccaggtcgtggaacaagtgggcaagaaggggaactgcacgtactgcggtgtgttccggcggcaggcgctcgaccgaggcgccgcccgcttgggcatcaagcacgttgtcacaggccataatgcggatgatgttgctgagactgttatgatgaatctcctgcgtggtgatctaccccgtctgtcgcgcggtactagtatcgtcaccagctccgacgcttcggatatcaagcgcagcaagcctctcaagtacgcttacgaaaaggagatcgtcctctacgcccaccaccgccagctcgactacttcactactgaatgtatctattcgccggaggcattccgcggcagtgctcgtaccctgatcaaggatcttgagaagattcgtcccagttcgatcctcgatatcgttaagagtggcgaggacatggccgcgcttgtgccggtggaagtccggggtgtgggcaaatccaagcagggtgaggaggaatcagctggtggatgtggtagtcaaaatggccgaaccagcggaggagagatggctgcaatggagaaggagctcgctgagaacgacacagccgagtcgctggagactgaaatcaagattcctaacggttcacgcgtgaaggcgaatcgcgggccgacgggtaaggcggtcaaggtgcagactatcaaacactgtgagcgctgtaactacatttctagtcagcggatttgcaaagcgtgcacgctgctagatggtctcaaccggaatcgacccaagactgcgatcgaagttggtgttggcatggaagacgaagaaagcagttctactttgatgagacaaatggagcgcgcccagctcagcgctacctgaagagtcactcagggaagcatgtttattcaaaccaaccttctgcaccagctttttcggggttctagggcatctccgccatgacccttttgctaggctgtcacctctgcaacacaatcacacccagtgtcaacatcaggtgtccattctcggtgccctaaacactgtgcggcaacccacatggttcgcaatgaacaagttttcaggtcaggaggatcattagataccccaagttacgactgaaacatccaaagtcaatgcataacatagagaaggttttaaaaaacaacaagttctgctacttggcaatgctctctattttattttatacatgaacaatagtatacaaatcccaaaaatcaacaacaacaacgccattccatggacacatacatcccagcgaaatcacactatcttcacaaactttcaaccaagcctagcacaactcgcctcttgcgtagcatcagaatgcagatcatgtccacaatcgacttgtcaccaacagaacaagctaaaccaaggcgaacccaggcaatccctccaaaactcaaccagactcacttctcctcaggaacatgcaagtcaggcaactcaaacccaacccgtctagccgtaagacgaatcttctcctcctcatccatagccgcaccagggttatagcgctcgacgagctcagagtagacgcgctgggcgcgggcatactgagcgagctggtctgcttcttggacgcggatgagccgttcctcgtctgttgttgggattgagaaggtgaggacattggatttcaattctggttggaatgaggataccgatggacttgagcggaagatcgcacgtagttgttggtggagtggggagggggttgagaggctgcggcgtgggagttcgcggaggagggcgcggtaggttgtgcgcattggtgttgtagacattttgagtgaggtttgtggtcggtttagtgggttttattaaagtgtatcaagactctggtgcaccggggtattggaggtgagtttggcttgggtcttgaagatgatcggatggatacataactagagaagacctcgggacaaattaagcattttcccgcctttttctgccgtctgctttaatccacgaacaatagggctttgagccactccctgcgttcttcatcattcctggcttcacggtccaagaacctcttcaccccctcgtctagctctctcctggatttttcataatctacatcgctaaccctaccaccccaatgcttgaaacagccagtgtcgtcaacgaatgcattcatgagttcaacaccttgggcccacagctcgccaccctgctcctgctgctggatttcttcgtccgagaactgtagcgggaatggcgttccaggagatctgccatcccgtccagcgccaataatatgtgcccattccttctcgacatctctcagcaggctgttgaggagcggctggtagtccattaaaactaatcccggaaccacaataacctgatgccggagagtattctggtcttgtatcgcttgaaagaccgtttcgttgagctgaagacaccgaactagacagagattgtgcagtgtctgtgctctatggagtgcttttgccttccgctgttcatctagatccatagagtcaacggtgggaaagcgaccttccccaaatcttcaggaactgggccgttgtaatcgagaaatgctgggcgcccaacctgcgtaaaaagcggacatgcgctaacggactgccagtcgataattcccacgatacggcttgggtctgccgggtcgacaaatatattctgagcatggagatcgccgtgccataaaaccgaggcgtgggtggctttgttttctgggagaacataaggtgccaccttaaggtagttttgcaacgaggggagctttttggagaggctaggctggtattgtccgggtccagagaaaagaccttcgggcattaagggataccgaagacctgcctttgcagttgcaatttccctctgcgcaatagccatcataaatcttatgactgttgaccctaaattttgtgcatggataagcacaagatagtaacatcatacgagtcggagatgaacttacatggaccacgctcaatatccaactcgcctctcccgaagtcaaagaaagaacggtgattagtcggtccaatggtaaacgttttgcttcgcacttcgttcccagttgaatcaaggtataggggcgatgtagaatcggaattgtcaggaaggtcatctttatagtacaacgacccgaacttggagaattttgtagctgccagtcgcctttcaatatcaacaagctggtccagtatttagactttctgcttttctttgacggtgtcccatacatcgttaagtaccacgccggactgcttctccatgatgatgtactctgccccgagagggttctctggtgctcgagaactccatgcgtacactctcggaacaggaaggttcagaaagttcctcagctaaccaagttagtatctaggcgcaaataaaaattgcagtaggaaaaaaagcaagccatacgaaatccatagttgcaacctcactagctgtcgtgaagtgtggtctgcctgcattgggatttggaagtttcgcaataatgtcgcgtctatcgtctatggtaagctgaaacaatttgttatattggccctcggagatctttaacacgtgagtgcatgctttcgatccgaccgcagaggcagctactttcagaagcgttgagtggtcgaatttgacatgacgacaggcaagctgctgtcgctcgttccaaagccaacgacctgaggtaaaccgattgagcgcctcaaggccatgcattgaatctgtgatactctcggtctcattcattttggaattgccagaaaaaaagaagccgccatgagtagtgcatcgtgggggttacagcgggaaagcgtggctgctagagttcttctcaggaaggggcctcggatagccttcatatctagcgttgcataaaggtagagagatctgtcatttcgctgtctataaagaaacagcgtgttgtgaatcccggttgtaggggctggacagaaggcgggtggtgacctgagccgattcgtcttagctgtctctacaatcgccacgacaccagccactaccattcttccacacgtaacctaattcctttctttcgcgttgagctggactagcgtaattgatatggcgccattaatatacacagctgccactgaaagtatcttggttctgttggtcggaacgaaaatgacccgaacatagtttccgaccactttcctcgatggtagtttcgccagtgtgttcttgcgaacataaggggtgctggaaacagacctttttactgcccaaggagtggaagaaaggtataaaaagagaaaagagaatcaagctaagaataactccaaatcgacacgattcgaacgtcattgagatacataaacatgtcaatatataccggggtaggaatatcctatctgcaaaacagtcaatggccatcactacccgcacctcagcatgcatatgtacaaaatgtcgtagcagaacattttttttcgcaagatgtatcaccgttacaagcgtcatatcgacccccgcagggaatcgagttcataacgaaaagcaggtaaaagacaacaacagtatttatcaatcatataggggcatagcgacatgagaaaggaggagtaggagaaggtagggtatggaggatagatagggaggcaggggtgaagatgttggatgagatggttgtgagggattggttgagggagcagcttcaattcgtgttgaggctgacggagacaagtgtggctgaacaagcgactgggttcaagagcgcaaccagccaaacttccttcgtccctcagctcccgtggacggttcgacgtgcaaactacgagcatacaagtcctagacaacgttaatgggaagaaaaaagattcatggtaataaaaatcttacctcctcgtctccggagagcttcgaatccaggatcaatcgctcgatttcgtcggacttctgagcctggggatgaggggtcttctggcttcgttgaattccgagaacaacctcacccatgacctcgaacttcttccagttaatgcgagatttgttctcgccgaagaatgtcttgttgccttcttcagcagaaacaaggtcgcgacggtggaggggtaggaatgggattcgctccgagaacgaattttcccaggctaggcggtaggcaaagtggcttcgttgggtgctcatgaggatgaccagacgcataaactccttctgagctgggatagggatcaggtctcgagtttgcgtgaggcggtggacgggagtgccgttgatggcggcgatgaccgcacccaaggagttgtagttgttttggcggcggagtttctggcaagaagtgttagttgctgctgacctataatagctggattgagaaaacctaccaccgcgatgttcatgaacttctctagcgcctgcgctctatgcttaggcttatcgcgtaagaggatcaggctggctacaaagaaggccagatgattgaattgcttgatcatccgattaacgttcgtcaagctcttgaccttatccttgtctatgcccgaaaggctgacatgacgcacaagatcacgcggccggaatgaattgtacatgatccagtcaacccgcgtcagttctcgtgcgaattcctcttctggggtgtccatgaaaatccgccattggagtttgccaagtgaagtcttatgtgtcagttcaagacgcaaagcctctttttgagctgcctcgaggctcaataatgtgaatgactggctgatggtactgttcgatttgtcggtattcgaggagactgaaagagttcccgagagtcgcgatgtcgagtcatgcggcccactactgagatccagcgcactcatactatatatggggtcttgctcttcttcggtgtcgtaggtgttagtgccagagccagcgctagcgagagccgccgctggagaacttcggccggagttgtcgaagaatgtctcagccagttgggactcatcggaatcactgtcacccccaaatgcccatccaatatcatcatcttctgcattcgagtctaattgcgatccgatctccttggcagcgaacatgtagaaatggctcttttcgagtaaagcgacaaattcaatgatccgtttgtgaagtttgggatgggcgaaatctccaggataatccgaggcccattgagccatgacatcgagtaatcgcagctgatccgccatgcgggccagttgatcttcgttgctcagctcatttcgctcgaatcggctgatcaaggcacttaagagactagcgggagcagcaaactttcggtacagacataggaatgtagaacggaacttctggtcttgtttcgacatcggcaaggaaatcaaacgatcgactagctcatcgaacgatagacccgtctctgcactcgagttgctctcgctgctcggctttggccgcacgactgcgctagggctcgcgggccggctctgtccatcgtctccctcgtcatccatgttcaaaaaactgtcgaaagcgtccgatcctccactgtgtcgccaagcggtatgcaatcgttgctgacggttatcgtggttggtagagtgtagttcttgtaccgacggtctgcgggtatttaaacgcgctccggatggcggagtttgcggtcgcaccggttgcgagttcctgcgggcataacggtgggaattggacgtatgctgcaagtagtttccatcggttgcgagacggttctcaccatccccgtcgacacattgatcagaggctgtttgtgggccgccggcggctgtggacacggctgagagggtttccgagttggcacgagtatgatgccaatcgtgctgggaagagttgatttttgttgaagcaagagaaatattagaattattggagagatctagaagagaagagaggggttagttttttaggggaaaaccgaagacgagtttatggggaatgacaaaagtagcgaacgctcctgccgcgacccaccttggcccgctcccacttgggggggtcaaggcacacctggactcgacaatggttttgggtcggaaagaaagaaatcgaaaaagaaaaggtacaaggggtgggggaagagacgaaaattgcttaccttctcgagtagaaatcactgcccccaaaaccagcgctatgcacatgcgttgagatcgaggcgaggaaaacgacgttcgatagatctcgtaccggtcgtggatcgcatccacttcgatgtcttccaaaggttcggggttgacatcgcatttgcaggccacctgcaggaaaggaagatccgaggcggccaatgagtctaaaatccggggaaaatcagcctccccataccaggtacatccatcgagttcaggtcaaaacctaccaatgagcattgttgttaaagagagtcggtccggcttggtggcatcatggagaaccaaaaccccgtcaatgactggcgcagatgcgtcgcgccctgtacgcggccagatgatattcttgtcctcgtcgaattgaacgtgagtcaagtcgacttccatcagatgcacaatatagacagatccgtttaatgacattttcttcttgttcataggggaggtaggtgggtgcttcatatccagggcacatttgacaaagctggtcttgccggcgttttcttcgccggccactgcaatggtcacttctgggaagccgctcttgggatattcctatagaacagggggaaaggtaaccgtcagcaattgaagcaccgtagccataaacgactcagggtcctgggatcaattcaagacgtacccattcatgctgaccaaatcgtgtgcgcttgattgcgtcgcctgtaattggcgatgcctcctcctcctccagcaatgtgtgttcgaccttcgtccccgtgcccggtttccgcaccacgtcgagtttataaaggccccccggtggggctgaagaagtccggcttcccatgcctggtctttgggaagctgtagcgggcattcctcgagctttatcgctgtaagctctctcccggcgaggttgctgcgagatcatgacggaaacggtcggcaattcttgaggccacggaatggatcggtgtgacagcgctccaattactgtgtaagttcagagaacgagcactgcagcgcatccatcgttaggacagatcaggttcggttgagcagcgaggcagccatccgaggtgtgtgatcaaaattgctcggggagttgacttgaaaactaccctgattagccggagctgcgtcggatatcttggtcttggcagtaacggggaagataaagcaaacagataatatggacagatcacaaagattggggaacatgaaattggtttgaggtgcttttttcatgaaatggggttctgtcgtttcactggacgcccgagagatcttcgtgttcttgaaagcggctcagctaggtctcaaaatgggtggccacgagaaccgaggctgggtctaggacgatctcgcttagacaggtctacagagcgttgcgttatttctagacaaattggtattgattgactagggctgcagtagctgcagtagctgcattgactgccgtgtcatcccctgcccccggaaacaaaaggatttttgtctttgcagtcctacaagtaggtcatctacaaagtacagcttatacacctcatctgcccttgtcttgagattctccatgtgactagtcagaaacatgcagattcaagttttcgtactccgtacaatagtactttttccaccgaaatctcggtctttgaagttctaggccgtttgtgatatgctccgctttattgggcgctaaaagcgccgctaatcttacattatgtaggacttcggcttttagtcttggctcgcatggtagcgttgtatgtggtgtgatattgcactttaaaattatgagcgccataagctcggtgctcggtgctttcacccgtgcactggcaaagatgcttgctagcactaggagggagtagtatgcaatagagaaccatgtaaaaacccaagaaggccgaatattcataacttgcatgaggctgaatatggctgtagctgtcaaatctgacagctactctattggaaccgtgaaggtagataaaaagtcccaccatctcgtaaattcaatctgcatgtctcacttacgtgccgaccattcaactcgtaggcaatttttcccagaagaagatgtagatgactcaggctgattccttgcccttcttgacaagtgccataaactgcatgaaagcttcggcggtctggccagtctcagtcccttcctcgcaatcctgcctcagcttgcgaactctgcccaggccgcggttgaaccctttctcggacgtccatgggccacgactacgaggagctaacggcccacgacctcgcccgcggccacgcccacgtcctcgcgcgggagctgtgtaggattccacccattcttcctccaacgttgactggaacatatcttgtagctggctgcggagttcggggtgccgactgagaagctctttcatctctgacgatgcccccactgctgcgggggtcataacggcagcattggtgccagttggctctgtaggttcagggccgttggtatcgttctcgggtgtgggattgacatcgggcgctggggtgtcactcggttcctcgttcgatggtactttcggagcacagtatatcttatgtgactgggtgcatgcaagcgagcaactaaatcaatacctcttagcaactggtccacttatggataggatagaatcataatcgagtccgtacctcatcagtgcgcatgtgggacagcgatattttgagggctctaaagagcaaacttcacaggaaccaggcattgtgtcgatttcccaatggatccatcagctgcacagcgatcaaaattgctccctcatttttgtctgttccacgtcctgctttagaatgatgcaggataacaccaaagttgggcgaccgaatgatttgcacaaaactaagaaacgcgggtcatctgcttctgcctcaggcactcaatatttgtgagcacgcgtgacaagaactacataaatacgtgacgtgctatatatttagatcgaaaggctgcacaatatatggcaaattcggaaaggggatgccaaaactttcctcggggacctggttggggtctgatcgtcacgtccagaatctacccctatggtgtgacggaacaaagccacaatgcatgcgatacatcaagagccacgttcacccgggatacccaagggatcctatctttatccaccactcggggagctaaagcatgacattcgtaccgtggccatgacaatcacttgcggggatatcaaccggccatattaggtgcatccggtatcaaccccggcgcgagtgcagtttgttgccacctgcgagttgcctttcagcttatgtttccatgggttgattcatgacatgtcaagatcatgttgtcttccatcaagaaacgacacctttttcttgttccgaggagatctaactcgccacatggatatgcaatgcgtgattggtacactgtgttgcttcttcatttcgtagggcagggaatttgaccagttacgtttctttcggtgccctcttcgagtcatcacagccttagactcaacccatcagtgaagcgttgacggctccactattctttccgtttgctattccgcctgcgagtattatgcaggtagcactgaaacttgtactagacaagcggctatttgtctctgatcgccatttctcggaatcgggattttctaacaaatgagatgatgaactcggtggctactgctgctatccattctggactcatcatctgctctatcagccgtgtgacgcggttgaaacggaactatacatacaagtttatacatcaactatgggagagaactcggtggcaagagcacctcaacgtgttacattgttagctatcctgaaggatagactcatccttccgtttgtgaaatgctaaagaagcttgatacagcgtggccttgtcatcatagccagttcctctttgggattgagctcaatcattgtatatatcaagccttcggatgttcaatattttttttcggatctaccgagtttccttgttgagactaagctgaatcacatggtctaccgaacgactttcattctgggtagccaagcttctcaaaagtatagctggtgtgaggcgaagttcatacttcatgttctcccatcataaggcttcggaatttccacgttttcaaaagatagcctttgctacgaggctgacacagggaagaaatttaggtatcttccgagagtctgcgagtaagcttgcaattgatctaagtgtagaatgcgttacaaaaattacgttttgatatatgatttaggatgacaattgaccgtgacctactggtttgtcaagcttggaacctccgacagtcggcacatccattagttgtaattgtgcaaaacatctcttctcattggccagaaaaccctcctcatttgtcatccggctatgacctcaggtcacgtgtaatttaattgcgtcagagcggcagccgaggagaccctcgagtgtttttttttctattcacctgttgtcaactatctctgcccagtacattctataacataatgtctttaagcactccatctacaacaatgttccgccgcgctctgctaagcagccgtctggccactcccgtcgagtgctccgcccgaacaatcagaccggcattcgcacgctacagatatgtgtccagcgcagcccgactcccgaccatcacagcatcagagacccgtcgccgaccgacagtgcgaccgcaccagcagcctgcctcgcagggtggagtgaacggcctctcgccaaccagcaagcgcaccatcttcatccaaaccgaaaacacccccaaccccgacgtaagctcccaaagctcaattatctcatcttaacgaaagaaaccgaactaacctttcatctccgatattccaggccttgaagttcattcctaaccaccgcgtcctcccggaggacttccccagcacattcctcgagtatatgacaccacgatcaacccttgcaccaccacacccatccccgctcgccgcgaaactgctcgatgtcgacggcgtcacatccgtcttttatggcacggactttatcacagtgacgaaaggcagcgacgcgaattgggcgcatattaagcccgaagtcttcagcatcatcacgcaagctgtgacatctggcgagacgatcgtgacgacgatcgagggtgccatcggtaccgagcaagagagtggcgaggactcgctcgcctttaacgaggatgatgacgaggttctcagcatgatcaaggaattgctcgagactcggatccgccccgctatccaagaagacggtggcgatatcgaattgagagggtttgagggtggtattgtaatgctgaagctgcgtggtgcttgtcgaacctgcgattccagcacggttacgctcaagaatggtattgagtctatgcttatgcactatgtatgtccatcgacgccttcccgttcattttgttttgacataaaggctgtttgctaactttgctcttagattgaggaggtcaagggtgttgagcaggttatggatgaagaggagattatttccatgcatgagttctcgaagtttgaggagaagctgcgccagcagaagggtgctgctgctacggcttctgcgcctttggacagcgcgccgtaaaatacgatatctgggagtttataccttgtacattagttttgatatgaattttgcgtaattagattatttacccttctatggaactgcaaactatggcctctatccatattcattcacataaaatccctctgctcatgtagaagtactccagctctgttccaacggtggttgaccccagtctttcatccattctgagtgcaatctgttgagctgttgctctttcgtttggccgatagatcagcatcgaccgaatcattgccttaaacgccctcttttctttttccgtcatagtctccaagcccgcctcaacccgtgccttttgtatagagtattcaaacctctgacctaagtccctccgcgcagacatccctgactttgaattcaattcgccctcttcgttgaatcaatccagttttgcactccacttttcccaccactccgggggtaaaacgccaagtgcctcgacttgctctgcgttcacgcggtcggcagctgggaagaatgcatcaaacaacgggcgctgggcagcaacctcccagattatacaggcaagtgtctagatgtccgacgcaaaggagagcggctcatccgagaatctggcttcaggtggctggaggagagaaagggtcttcgagtagaatttgggtgatatatttgggttgaaagattcaccgaaatcgttcaggaagatcctctcatcgctaatatcaatatccccgcagcggatgccaaaccaaccgggaacaaacacttgggctggtataccattcgttaatggctttccatcgagacgaataatagcctctgtggaggaatgcgactccatgaataagctgggcgataatcgaccgcgcgaccttaggtcggaaaagcgccaattttgaagactctttagtatcaaacaggctcatctgtgcaggcggagtgacgatacacttatgcctgccattaggaccggcaacccaaaattcgtcgagaaggggcggtataactcctcttccaggtctagacggcgcgttcccaagagaagatataagtctagcctcctgcgtgtagccactagcatcagcggtgatcactttcactgccacatatcgagcttttcgcaggtcttgggctagccatatggtcgagtatcctccatacccaagcttgtctatcactcgatagcgggcattgtctaacgcatccccgacttgtagaggatgatatcctccggggtggtatctgtctaggtcttcgacgtcttcaatcagcctatactgggacataccaggtcttctatctgtagaagattcgttagacccagctgtattccgactggtgagtgtggacatcgacattgacttttggatatggaactgattcgatagaaaactgcatgcttgtctagagaaccgcgacggggctacgcgagggtgtgtaaacatctgcagaggcagcatctagcataaggtcaaccgtcacgcttagatagttggcctgacggatgaggtttaggttgggagctgtggttcgtcgtacactggccccccttgcctgtgactgcaaccaattagcgagtcctcatttcaagctcctctccccactgagtaggccacatccaccttgaccactcctccactttgctctgcatgttacggattactagtgtaaatgattggtctttcacaatatttatttgggtgtgaccacgtcctacatatgcacaattatccgtattgcatagtacaatgagacatacacagtacctacgtactgtatcaattgaccagagtccgtgtagtactatcctagcttggcatgtcttggctctagggggtgagaagcaatcaaggaatgtatgtagatcgaagtgtcataaccatggaaacattgccttgctcctagccaactcggggtcctatattactccaagagaaaaaaggaaaaaggataggaaagaaaagaaaagaagaaaacaggacacatgacccggttttcaaatgcaccttacagcgcctacattagcaaacaattaaaatggaccatagccaacggctggatgctgcaacatcttgtgccagggattaaacccggtcggaaggcccggagcagaagatgattcgctctaaataatttacagagtggacattgatccttgagtccccatagacagtattgatagattttctttccctatattgcacaaggggtggaatcatccattgaggggttgaggggtacaggagtcacgttggcaatgtcattattgtaccacacgacggtgtggcacaaagctgttcaacggtccaggtgcatttcctgatatttagagagagagatttatagatagcttccgggagagaagtcaaggtgccaaaaggaggatgttcgaggtgagaagaagctcatttgatattggaggggctggtatgaagtgtcagaaaatgcacgtcaatccggggtaaagtggaagaacctgccccgcaagcgtgtgacccgagggccgtgcgagggctttctttcttttggacgtgaggtagagagccctggcgatactagatactgggctattggtactccgtagagatgtatatactgtgttcgatgtgtatacgtacttctgactgagtgccacaaccccagatgatcggcttatttctccaagggacccgcctgttctgggggggtctacgccacttagccaaagcctatggagagctccgtcttcccaacgatcttccaattctttattattccatatatcgctggaagtgtaggatggtcctaataagttctgctttatgatttccacgtctcatctgacaaaaaagtcgacctaaacatctctaaaagggaagctcccaaagaaactgaaaattctaaaaccaaagatcaaaccatagtggcccgtgtcctccggggcaacgttgccagatccgtaagagaagttaccccaggctctttgcgttcccctcatcttttatttccccctctcttctctctcccactttcatcatctacacaacacccttcttcgatcgcaagatgcgccatccttaaggggatccagcctaattccgccctcccccacgtcatctgcggtcacagcttcgatcgtgcaaacccagcgcattctatttccaatagaccggtcatcgaatatccggattcagcatcttcgttgacacgcgcctcatcccatccccgcaaaaagcactcctactgctcgccagacctgtccgacctcttccatcgccctcgttcctccgttcacgaaatcaacctgtgcaactcggacacagcactcccccaacattcttgacgagacccacaataaccgtgcgcaccttgcaaatagagatttcgagagaaacgatcagagtggtgagtcgcgcaacatttctgccgagccttgtcctgaacgcgactgggctgatacatgggtgattctccagacacaattgcgatcacgcgactgctgttcactttcgactctcgtttccaagtggatactattttgcttgagagctgtatggtgatctacacgcgccagctaaaccagctaaagattctctcgagtatttgacaccaacttgaggtacgtgcgattctgattctcggtcgctttgctttgctataccttatgcggtgtgcgcctctccgtggcgctatctgcttctcttcctttcgcactcttcctttactccccttgcaatggtacttccttcacatccatgtcctttcgtttcagttgcgcatagctgtctcttgatcgaggtttttttttactatccccacttccggaccctctcgcaagaggggccgaggatatgcatatatgcacaatctccgcttttaatattgcgtctctcagtcatgccatacctacatatgcttatattacccttcgtttatccttttctttccattttactatctatttcaatatgggaataatcactgactttaatttagccggagttgaacatagcgcatcgaccagtcatccatcgttcgcttaaagagcaggaatcgacctttactccaatctcatcgagcgcgtggaccaagacgggtgctttctcgcatgtgttcattttaccacgagacatctatacagtacagctttgctattaacaaagatcgtacaggtcagtgaactacctctcattcctccatggcctcgaattattccttgatcagacagccgttgtgttgcttcactaggtttcaagtggcgctcatggtgatacggtctgcaaggaataatcgcatgtgtcacacatattatactgggaatcatatactaacaatgcaacagtgttcctctaaccgtaatggcatcgccatctaacaaatcgaccccgatggctcaatcgtccccacccgctacggcaacagcgtctgccatccttgaaaagactcacccaggcgtgcgccgttccaccccagactcggacgccttggcttcctctgacgatgatggagaccatggagcgcaagctcagaactttatcccccctaccaccagaccaccagtccgtcgcacctcttggttgaatgaagtgcctctttccgctcagcgtaaacattcgctgcctggaagccacctttcttccgccccatctaaccctacaagccctgctactgatcaggcatcatgggcgacagctacgagcccaaatcttgccggatctttcaattggaaccaacccggaggaagtacgcttccctggggcacaagcacaggaatctggaacacagaatcacgcagggaaccgccttctcgcttggcagaaatgataccctctccgaccatgaccaacccacctccttcgggcggcaccataccagacgaaatgttgagccctatcacccgtactatctctggcgattctgccattccattctccatcccgttacaaccaactctcaaaacctatcgctctcagtcatactctgttggtcagatggatccagagttcctcagcctggctgctggcaaggccggtgcaggtgcacaatacccaggaagtcgctcccgtgctcctggccaaatgtctgctgttcagcctcgagcatcacggcctagtatgctcggtgaattaggacatgatactgcaatgcttggtcgagtccgcgaggatgatgatgatgacggtgacgagagtttcaacggctcggaaagtgaaatgagctactcagcgagtcaggctcggcaaatcgagcagctggcccgcgagaacgcactcttacggcaagcagccgcggcaggtcaaatggataacagataccgtgaacgagctggatcggttgcatcaagcagtggagggggtcatccactacatcgcatccgaggcggcgttccagagggagatttggctgcagaggacctaggtgaattgcgtgatattaccggatacaacatgcgtggtaatgctcgtcgccgcttctctgagcatttggcgcccccggaagcgcaattctcgtccttcacctctccgctggagaatcgtgctctagataatgtccgcaaggctcattggcaaacgtctctaggcttcggtggcatgtctgacatgccacaaagtcgccgacattctttcgccgagattccgatgcgtcatggctcagtcggctctgtggactcgcattcgactgctactcctcgcgcaactataggagaccgtgatgacggctatagtaaccttggtgactatcccaaccgtaagtctatatacttctacacccttttgcttttgctgtcattcaatgctaatatcttctgcagaaccatactactcccgtgaacagaccttgcgtggagatggctcctcgggtatcccgtcatctctcaaccaatatgcgatgtcgaatgcatatgggcgtcagtcatccgcgttgtcacatgctcatcaaaatcagcttttgtacattgtcgccttcaaatgcagccgtgcagatgttttttacatccaagaagataccggtcttcaggtgaaaaccggtgatctagtcattgtggaagcggaccgaggaacagatctaggcaccgtcattcatgcaaacatatcactccaacaggcacgggagttgaagcaacattacgcagaagagcattacaagaccctcatgattttctctagacacggccagcctgaggggtccaccctcgccaaccccaacacgggcttgaacactcgaagtgccacaggtggcatgggtccccatggtcctcacagtgtgcaggaacccgcgacagacatcaaaccaaagcttatcaagcggttggcacagcaacatgaggttcttaccttgcacgataaggaaggaaatgaagctaaagccaagcgggtctgccagcaaaaagtggttgagcaccggcttaatatggagatcctcgatgccgagttccaaatgtaagtctacaccattccgattgccatccgtgatggttgaactaattgttacgcagggattggaaaaaacttacgttctactactttgctgattcgtacatcaacttcaactcactggtgactgatctgttcaaaatctacaagacccgcatctggatgtcagctatcaacccggcctcctttgtcacaccccctacgtctggcctgtcaggtcctggcaccattcccaatcctctctatgcccaggaagcagaccgtcgccaccaacttgacagtaggtcctatggcggagcgcgagattctgtcgacacaggtcgagatatgccgaaccctgtgggcatgcttcgcacatcctacggagagtcctaccagcctttttctcagccatcccgccactcagaagggcttaattcggatgcctttgccccacatgtgccatcgagctttggtcccgcagattcattcgaatatcccggcaacatcggtagctccaatggttcttcccgtgtgcacccagcgcagggcgaatggatcaaccggttccagggcctgtcgctcaactcctaaatcccttttcctgcctttccttctcttgaatctccgctcctcctcgcctatctctgtacaatcgtctgaccctgccctcccactacccacctgcgtcctgtcccatattatggggcttgttctcgcggtgaaaagagactccttatgaacctagatctgatcagctttgctattttctctttttcaacgcagatatcgccacctcgtttatctcgtctttttatcttttctccccttcctcaaagaatgctttccgctgaaatctggacgcgcttgccgttcgtttcctgtgttatgttcactgtgagctggtctatcatacttcttctgtgccccccgtaccctcgtttttatcgaggttttgaggtcttgttctgtactactgttgttagaattcatacccaaggcttgctgctctgccggacacattcccccattctgtcattaccgtccgccctttcttctcgccatagatctgttttttccgtgacgaatcatgtcttccataatcagaactatctctatctacaaatggatgtgtgtgttgtttgtgttaattgaagttaagttgaatccttgatttgagatactctcgtgtttgcttttggtatcccgttgataatttcttaacatacaagttgtccacagatcggaaaagtttgaaacttgcgattaccagagagaatagaatataaaatgggttcatacaaccctagaagagagatttgtgtcattattatggctttcctcgatgtacttccaaaatagatgcgtcgttctgttgatagagaaatgaaccaccatctaggtggccctcgaaggcttgcagagtgccatgcaccgcctccatgattcccttaccgggtctgcctgaatcgatcatcaagcccagccaatatgttggggtttctctcagtctgatctgagctcgcgtgacgcatttctattgtcttggctgtcagtgacctagatgtcgacaggccagaccgacaataggcgagagagaacattaaagccccggcatcaaggacccaagcccggagctagcacaactcgaagatatatcgtggcgaacagaaccaagtcagccttgtttcaggacagaaacactactaccatcccatcagcaccaactctcccaaaccaggaaaaaaaaaaaaaagaaaaactcacctgaagacctcaagcccacttatcatgtttcccactaaccttaacatccagcagaatctcatgaaaattcccgtccctcctccctttcctcaacctcctaacctcctcatcatccaacaccctcccaacaatcccctcaagctccttcttgctaatcttctcgtacgctttactctccttggacgcgcgcaacttcggcttaaatctcgcctgcatgcgcacgcgcaccgtcgtctcaaacgaaatcgtattcgcgtcgccgcggatctccacgccagaagcagctttcgcgttctcttttatcgagaggaaagactcgccgtcgccgccgtgcgtttgtagtgagaatgtccccgagacttcgggtgaggggattactaggaaggattcgtagtggctgactgccgaggcggttgcgctgaagaggccgtgtgtgtctgaggagaggtatctgtagttagggaggttgttagttttgcattgcattggaaaaataaaaggaagacagaattgaaatagaaattgggataatatggctatagtatgcgcatgcacatattgcgataaaaggcagtagtatcgattcacttacttcccatggtgtcccttgaaactgaacgactccgtccccgccacccgcgacgcaacccagacctgtcgcacatcgtgtggttctgccgtgctcgggtctctctcgatgaggttctcgagcttgctggcaaaaacttgcccgttggcgtcgcttgcgacgcaggttgggtcgtctgagggcaggactaggaccactgggccggcgatgtcgcttggagagtcggcggagacccagctttggtcttctgggttgtcgtctggttcgggttcggttttgcgcgatttaggggttggggcttcggtgtctgcggtgcgagtcttgcgcttctttggcttgtcgcctttgaatgttaggggtttgaccattgtgattaaatgggtgatggttgttggagcttggagcttggagtttgagcttggagagtttgcggagggcggggacgaggccgggcttggctggggtgacggagcacatggttgactttcatttctatgtggatttggatgtggttttgtatatatagtcttctttttgctaatataaattccctctcggcgtaatatcgcaggtgaatgcttttggcccccattcgctacatgagtcctgactactcaatataggctagtgctgaactagtacggattgatactaaagcagcgactataacattcgactcttcatcatcaacttcttttttctcaaatttcattcctatctacgaaactctcgaccatctccttcatagaaccatctcacgtacataactatgtgccccaaacctggccgccttgcttccattctccgtccatggggcctgatctggttctcgatttgccgcaagtctttggtcaccgaatttccacgatgatactaatcatccattatagtgcattgggaagctttgacacaagcggttcgtcgagacggtctcgcagcacttggccgcccacaacaaattcgagatgccgcttcagcgaagttgttcagtataacctgtaaccaaaccatgtcttctctcaactcgtgcacagagtgaattgaccaccatatgcagctggaaatttcatcgcctatgaagacacaaccgttgttccctcgctcgtacaagctgctagtggcgttattctcgaactgggccctggcccaggcaatcagattcatcgttatgacaccgctcttgtcaagcatatctatggcattgaacctaatccgcacttcaaagacgccatagatgccaaattggacaagtataatctgcgggataggtataaggttatagtttgcggcattgaagacagcgatgttctgagggaagagggaatcaccgaggggagtttggatgccgtgctatgcatccaggttctgtgtgcagtaaaggatccaaagaatgtgatgaaggaggtgtggaagctgctcaaacctggaggcaagtttatattctgggaacacggatggagtagaaaccgcttgacgactgtagcgcaaggtgtgtatctgcctttcttcttttctagactctataggtgcttggctctggaatgacgcagaccggctaacatgaagaaaccttagcttgctggaatcctgcttggggcacatttgtcggatgtgatttgacgcggaatgtgctggcagacattctcaacagtggagagtgggaaaatccacgcgaggtccaagaacctgaagaaccgtttagtctgttgcctaggattcagggtgtgcttgtcaagaaggcttaatgcctacatcgccaatatgtaagaagacaaagtagagctcctgcaatagcagcagtctagacagtctaaaagacaacatttccttttcaattcactgcataaacctgtcaataatattgccgatccgatttgacagattattaatctcaaaagtgctttggtctatcaaggtcctcaatttcaagtacacacaacgtcaagatgtcccatatttcaggaagagatcaattctattaaccatctctaggaaaacgtactttgtatgatgacatccacgtctaatcatctaattgaaggtgatggcagccttgatagcagtcttgttgcgcgtcgcctaaaggcactcctcctcctattatacaccttgctcacaatgccatccagttttacctggccagagtcaagattgtcaacagcagcagggaacttgtaggtctcagaataactgctgaggatcgtgattttatcgccgactggaagggaatcagcaaagcactcaagagaagcgacagcaaaacttacagatcttggctggcggccacgagacccgaacctcatccgggtacacgcggtacatcaccaacttaccaccacgacgaacatagttaatcgagtcgtcgagaatcttcaggctaccagtagcctaaacaacaatgtcgaatccatacggcttctcagccttgagagcatcaaattgagactggggactcgcgcgacagctcaatgtacttgtcagcaccaagcttctgagccaaatccatcttcagacccccaacagaaacaacaacgacattgcaaccaccattctggcgcagcatcttagctaacaccagaccagtaataccatcaccaaagatcagcacggaagagcccatcttcggagtgatcttgtccaaaccgtgggcggcagaggaggtaggctcgatgagagtcgtgtcgatataggaaaagttcttgatcttatagactcttccagctgaaagaatatccaaaatcagccttgggaggccggtatgctgttgagatattctacttacccgggtaggcgcagtcgttcaccgtcacaccgtgagcctcgaagtgctcacagaacagctcatcgccacagcgacagtagaagcatatgccgcatggctcggaaattatcagcgaccacttgctcgccgatctcaggcacagggacatcaatcttgggctctgattgctgcagggcacgcatggtcttgggtacggaggtggccatgattgaatgtaggatgtgttatgtggagggaagagagaggaaaagttgagaagaggtggtttgacgaattgtaggggacatcctcaacggatcgttagacttcgctgttggctggggtgtcttggctgtcttgtttgctctttgcgctttgtgaaattgactgacttgaaacaagctgcggcaaggacccttgacagtggatgctactccgatccgtggccgtgtacatgtattcctagcctgagactaccaccaaccatcatacatgtgttgaccacgcacctaacactgccctagagacaaaatgatatgtttttctatatatacctaagacactctagtgtggaagtaaagaaaacaacttaggaaatgagagaaaaggaagagcaagctgatactatggacttgacagcaggtggcctagtggtaacattcatgcatgtgtactactagggaagtgccgaagatcttccaccacctggaatgttccggatcgatttaggttgctctcgcgttcgactcttttttattctcttgtcagatggaatatcttctcgcagtccgatggttttcgggggcctgtggtgtctaggtaaacacattgattgagatatttgaaaggatatctacatgcattatgttgtttgtcttccacatggaatatgcatctgtccagtgtataaatcgctttctaccgcttggtgctggtgctattcttgagcatctcttccaaatgctgcaaggcaagttagttatagggtctctgatagacatgtggacaagtcaaatgcttacctgcttctgctcaactgctaatttgccttgggtatcctatttccgattagcggacgttgcccaaacatagggctagcaacatacgctaatgatggttaaaatcaatgaataattgttgaagaggaaccgctctcttcgcttggcgtctgtaccattacgactcaatttggccaaaagagaatcgaattcagcagtcaaccgggccaggctgttagataccggctcatcatcaccagcatcgctgctgagcacaaggattccatgtagaagctgtccgaatcgttgagtcaagaagtggggcgccgaagactgcttcaagtcatctccgcctgcaatcgaaagggccgagacagcactgcgactagtgttggacccaactcgtttgagtgagtcgccatgctgatccataatcacttggaagcgtggccagagctgcatattggttccattaacatacgagtcggcgacgggcacctttcggcgctgaagctcaaacgcggaatgttggttgaggcgaacacacatgaggacacccagagaatccgtggtgtgctcgattaacttcttggtctggttctggccaagggtaaagaccggttggaatatttccacggcattgcgagagatttgatggaaggtctttggggagaaaaactcggtcaggaaagaatactcggcgcacacattgtccaccaatgcgaggttaaagtttcgaaacggcacttcgattccatggtaggtattatcctcttcggccagatatgaggataaagcctggagattgccagttcggaggacatcaatacgtctacccaaggagaaaggatcgtgtacggcagagccagctcggccgccaggcatcatgttccctgagataatcagtatatttgggagcatgagagcagtatatttcttacctgagcgatgtgtggatgggtcgcctccaagaacctcgtttcggtcaggaggataaaccttgaccttatcgagggcttgcaggtaacgtgtgaaatgagatgtgtaataccaacgcattgtgttgatgtacgcctgtgatatctctcctgccagctttgggtggacctttgagagataactgtatagatctttaaacttcaccagtcgctgttgttggataatctgagagttgatgtttggcgatcgcatagcacgaatttgtgacacaagataatctctgatcctttgaactgcctacatagatgtcaatgcaggtctacataatctgagggcagcatactcactttggtcttcacatcggctaaaaggggtcttacatcctcgacggctttgtagccgttggaggaagcagcggccttggcttcgatatttgttgttcgagaatcgatctcgttcagtgcacgcacccaattctcatcaattgggccttcgacaattgtccgcaccgccttgggggaaatgctgatctcctccacggcgggtcccagcagccgttccacgttgcgcctattctctagcatcgcgttcaattgtgttgagcgagattgcaaagtttcaatctctgcggatacggcacccagttcattctggaagtcattcaagtacagctcaactgacttggacacctcatcacatccagtaatagatgtatgtaactcttcaaacttatctcgctcttgctcaaattgctggacagtttgcgcgtttacatcactctcgcgcgttctttttattggtgttggatcctcctttttcagaaagtcttcgagacttagcccgtcaaaacggatagcttccaccaattgccctggtcgttccggcaccgacgatagcggcggcacatgcttatctgtctggtttttttcctttccaatgatttcattcaagacttccagcggatcgggaacattggccggtcgaggtcgttgaatactcgtctgctttaaaggagaaccattggtcgcccgtgcagttcctggaagagaggttgtagagtcgtttggggtcaggagaagagatgttgacgagcttctagatgttacaccagggcgactattgtagggacttggagatagctgggatgatgagcgtcgcggtaaaggagaaaggttgcggctattggctccggaggaagttgactgggctgaaatgcggtcgcgccacattgtgtaaagggatgaacggcatggaaatgcagaacaaaagcaagaattcaagtgtatactcggggaaatcaaccaagtaacctcaacaagaaggtcgaacgttgtagttgttaggttgtttcaggacactcggacgctccgcctatatacactaaacccaacaaggtggacaaccctcctcgaccaatcaccggccagtaagcgaccccgccacagcgcccacgatagattttagtcgtttgaatttctctctccccttctcttcatttttcccctccccaaattttacgaaaaacccccctctttcaacccctctacatctattcaccatgtctgccgaggaggtatgtactttcttttacaaattcgagatcccccaatggctgtctcgaggatttctgtccctgccccgcatgcggctccccttctattctcttctcgagggcacgaggctatattggactctcaaccccgccctattgtctcatttgaagcgcttgctaacataattcaatatagcacgatgtcactttcgattcggctgatgccggagcctcgctcacctaccccatgcagtgttctgctctgcgcaagggtggccacgttgttatcaagaaccgcccctgcaagatcattgacatgtctacctccaagactggcaagcacggtcacgccaaggttcacttgatcgccaccgatatcttcactgccaagaagcttgaggatctctccccctccacccacaacatggacgttccccacgttattcgcaaggagtaccagctcgtgagttcccctgatgacttgacggttgaattgttgggttgacgaatattagctcgatatcaccgaggacggcttcatgtcccttatgaccgacagcggtgacaccaaggatgatgtcaaggtccccgacaacgaggttggtgagaagatcaaccagatgttccttaccgaggagaaggagtgcagtaagttccaaacatatccaaacttcctcgggacttatcactgatatgtgccatcagacgtcgtcgtcctgactgccatgggcgaggaggccgctatggagtgcaaggaggctcccaagtctggttaaatttaatacatggatttattacctgttatgccagcctttatgttccacgagggctcaaagcccgccaaaaattttatctttcacggttcaaaggaggatacgattctttgaatgattatgcccattgcttcaagatctgtccccacataaccttggatgtgggctggaccgagaattgctttggttggcataatatgtgttgtccgaacagttctgagtctcagcatctcatgatagtgtgatgaataaatactcaatcttgcttgactgcgcgagggttctagtagactatgaagtagatgaatgaatttagagctcaattacactcaaccaaaatatacacaagtgtaaccccacaaataatgaaaaaaaagtacctacctagggactagaagcttgcaattcaatcgtctggtatagtccacggatcaatcacagcgcgcgcattgcgggacatgtggagcgacaaaaatcggcggtcactaggaggcagaaaaaaaagtcccgccatctggatataccaacccttctttgtcaaacaagcatgaacaaatcccttggggatggactacgttacccgaggggtctgcggtcaagaaggttgtcgtgagacccgatactatctagacaatggactttggtattgtcggcgcggtcatttgcaggaggtatgacgtccatcggcttttttttttatcctatcactgcatccaatgtcaggaagtacacagctaatggctatgcgacatgtgtagggtgttcaagtcgcagaagatgccgccgattttggaaacctaggcaaaacacatcgcgtgaagagagaaaccagggagaaggtcagcaagagtatgtaattagcagcttcagcctcgttctctctgctgactttactaacagcactccgtggccgtccggcatacacgcttttcttgcagacctaccagcttatcctttggaaacaatgtcatgccttggttcatgaacacgggttcccagaggaacttgaggtatgtgcatatgttgcttcttgtgttcaaggataacagctcattatttattagcttgttgtccgagatctctgggctcttcgtctgcaagatttcgaagcaagaatcactgattctactgatggcgacgacaatgatactgaatctgaggtattcagctcgcaagccgcaaaagatgaacctcgtgatatgggatttaaaccaaactcgagatatctcgaatggcctcgtctgatcgattctgttgcactgtgttatctcgcagcgttcttgatgcggcttcctgtctgtgtcagtgatttccacgggtatgtatattctttcctccatgcaagtttgcttctagaatgcgcgcaatactcacattctacagcatgataatgcggcaagagatcccctacgtccgagtcctggcaactgtcccccgagaaatgagggataggcttccgccagaactgactgcgatccttgaggttaatgtgagtgtagtctgactctgggatattttctgggttgattgactgatcttgaaaaagtcaatacctaatgccgagcggttccatcgcggcgtcctggcaatagtgttgttctatcagcgccggtttgaattggaccttcctcccttgaatttacccctggttcttttccggctcatcaagagattagccttaccaagtatgagagacagtccgccaagtggttgccagtttatattagctaacgaattttagttgagatatatgatacaactatgatcttgcaagatctattaggcttcacacttcagtatccgacaacaagttcatccgatggccgaaaaacagcacttcttcttcctgacttgcaattgatggtgctgattatcatttctacgaaactcctgttcccaatcgatgatttgaaaaggtatcccagcacagatcaagagcccgctgtgcaggtcatggactgggccctctgggcacgctcccagaaccacttcgatcgtgatcggggatttgggggaaatattggaaaaaagactgccattcagatcacagaccaagatgtgttgaacatgacgtctgcccaattagacgattacatggactggtaccaaagcagttggctcgatacctctaaggaacccagtcgcattgccacgatgtttcccatcagccgggcagaacgagatacccaaccaacctctagcgctgtcccagaatcatcctctgcttgtaccactgcccctgcctctgtccctgtccctgctactggtgctcctcctgataagactcgagagaagctcgaacttttgctacaaacagtcatgcaagccgttagaaccagaagggtcatccctgacgacaaagaggctgatcacgggcgtcccggcgagtggtatcaccggtatcgatgggaatcacatctcagtggtcccgcacggactttttatgaggtagcagcccagctcgctgcggtccaattgaaaacacttgttcgtgctgtcacatttgttgaattcaagatttcacagcaagatgaagagcgacagaacagagagtacttcgctaatttgggaagacaaggaatgcacaccggggaaagcgatgttggccacacgtatggcatggctgattttgaagaggacatgtacgaggcggggtccgaggatatggatggtgatgaaattttattgtaatcatatacacggcgctgggccttcgggatcatgtatctggcgttcacctttgtgtacaaccttttgtctttacctagttcaattacttgattttctaaggtttctgtgaattattgtctttctcgacgcattaatctttccagctgaggtggtagtcgaaggatttgtttattcgatcaggaaataccattgagaacagaaaacacgcttcatttatggtgatctactatacttgacgtagatgcactaccaagttatcattggctggttggtcgggctgcttacataacgtatgacgaaaatgggcaacaactagggcttagggtaccccgatcggtccacctttgctaagcgagcgaaatcctcaaattgacaatcgacagctccgcctggaacacagcgaccgacagccgacaacaacgagaactcgcaaccagtacgtcccataaacctcgtgaaacagcatccatgcatcgctatggattcagtgagctaacatcgtctttttccgcgccgtttcagtgcagatgtaggtctttctgaacccttaaatgtcatcgcgaaccacaatcccgatcccatcgccaatacgacccaaacccatggaggaaaaatgaatatgggctaatacggtgcgatgtagtttcgtcaagaccctgacgggtaagaccattaccctcgatgtcgagtcgagcgacaccatcgacaacgtcaagaccaagatccaggacaaggagggcattccccctgaccaacagcgtctgatcttcgccggcaagcagctcgaggatggccgcaccctgagcgactacaacatccagaaggtaggaaccggaattcaacttgtgatgtgatttggaccgagagcggggggcattgtggtatctcgggtggatcagatttccaacatgttcttttttcagagataaactctgtccacggatacgcaagaggaggaatcatcgctttgcgttatggtctatggtctgcgaaatggtggaacattcgctaacatgcgatatcaacctgttataggagtccacccttcaccttgtcctgcgtctccgtggtggtatcattgagccttccctcaaggcccttgcctccaagttcaactgcgacaaggccatctgccgcaagtgctacgtacgtttaccccgccttctccgcctgcgccagatgattgtcatgaagaaatcgcctttagtggcaaggccatgaattccatgtactaactcgaacctattacaggctcgtcttcctccccgtgccaccaactgccgcaagaagaagtgcggacacaccaaccagctccgccccaagaagaagctcaagtaaacgactcgccccttggtcttgtgctcggcgtgctgttccagagatggggattggctggactgctacatggagaggattacaaatggcgttagatatgatgataaaatcaatgcagccaccgtcatactttttctagttgactcctctcgacgaccaagttgcactccatgaaatgaaatgtgtaaaattcaaaaagtcgaattgcttcacatctccaaattccgtccgcgataaataaagagtacaatacatgcatgcgttcaataacacgactaggaaaactgctacctgagcaagaattgacggaatggccagtattccagatgaaaagccaatgatccatcctccctcgcttatgcccggaacatcatccctttcgtgtcgtccttgtcatcattggggttcttgtccttgttgttgttcttctttgaaaccgggctcccgtgactagtagatatgttagctcaaggtcaatttgtttgtcagacaaggacactacttacgcaaagaaaagcaccttgatagcaatagccagtgccgcatgtagcacaacaaccaagaccaagaggatcttgctagccttggcatcagtagcattcaagaccggatacaagttccgcagaaggaagaagacactccaagcaaagccaacgccaacaagcgcccagttcagcgcagtcaacggactccagctgaccagtgcaacggcaatccagaccaagttagagtatccatataaagcccagcactcaataaggtcagccgtcgagctgccgaaccaacgcagcgcaccccacagggcaataggcaaaatgccggtgtacccatagaccagaccagccgcgcccgatagcaacgtgaagtcgtactcgaagtgcttgtcatcattgttcgacagccattgcgagatagtgcctgtcaaaaacaggataaccaccaccgtagtcgcgatccagatcggcccgtataggtctgcgttaccctctagcacatcgaggaagttggtgcgcggatacaccgttgccacacagcggcggaagacttcattcgtgtcgacatcgaagaattgctcgtagtaatgcagcgaccaccagctgtatttggccggcgtaccgccaggggaccggtcacggcggcgcgatggcccgccacccaggaacggggcggagtcgccttggactttggcggttctttggtcgttttcaaagtctaagtaggattacttagttagagaatcgggctgggccggttcgcttggtggaactcactggaggggtggaattcgaggtcttcttgcaggtcggtatggccaaggtcgccctgctgatttgttagacggaatggtgtgttgttcatcacagcgctcttacctctgcatccacatctactacgacatcgtagcctcggttcgccattgtggttagttttgaggtaagctgttggaaggggagttgttaagtgtacacatcagcttccgcagataaagccaccgctcaagccacaactgtggataccagatcatacacgagtatgtagctaatatatattatttgctatgaattgactgagttctttcactacatgtaaattatgaagttacgatcctcagatataaggtttttttttggtttctgtcactttttctctttattatacacatgcaatagcaccaagcatccgcgatatctgacacgttggcttgagattaaacccagttccggattgccctttgaattcggccaacataagaccaaatcgaggtgtcgagtccctttttgcggatatagaaagatgcagttccaaccaatatagccagtaacacagaacccacggagcgacggtggctccataagaaatccatagctcgtttcctgcgttcttcggcccgaatctgttgggattgcttttcaaaaaagtacatcgcgtcttctggggtgcacttgcgatgtgggtctcgtgaagtcttgagcacgctacaccagggaatatgtttccaggctccaaacggcaaggatttcggcgggtggtcatcaaagagccgagccgcatgcagaatgtgtccatcaagatcaagtgggcatggcagcttagaaagcgtaaaatgaagcatctcgggttcatacactggtattgccagcaactcttttttcctagacaggatcattgctgcgaagaggtaaattgcaaccacaggttcacgagataaaacaaagtcgaaaactcgtgagatattgctgtactcttgaatatcatgggcgtatagtgtcagtgtagctgcgagagcgaagaatggttcaatattgtcaaggtgtcgtcttagctcagggtccgttgtttcgattattgcaggaatgagatgaagatgtttcacggctggagacagcgatggtagcatgtagtcacgtatgcggaaaagggatatctgtgctactgctggcacggcctgcttctcgcctagtaccaaaagaagaacttggactatgtcatgatatccttggaaataacaaagcatagggtattccctaagcacctgggtgatcagttttgatagctgctctttctttttcaacatctcctcctcgggagctagactctattaatatccaaactcgtcttgtatggagagttttaatagcataccttttgggtaatagacaaatgatcggttgacgtcgagttctacttgttcctcatcggcatgtcgtaaaagttcagtacttggggccgtatcaaactgtcgtatttggtcgtcgcaacgtaacaaaataggccctgttcaccagttagttgagtctatgtgtaattttaccttcttcaaaccggaatatatactcacaggctatctgtctcaagtcatcttcaagtaacccgccttctgaagttgcgtgcacagccaaggcttccacatcgcgcgccgcacatgctttgcggatggcttttgccttttccgctcgagccatctgttttgctgttgtatccaattcgaaattgtttgagggttcttctgatgcagatgtgtcctcagagctgggatgacccggttcttttccggtatcttccattctttattcgctaagacgtccttctcaggagatcaagcagctaatatgcacacacaccagaaaagatgaaagttatcactcggtttgtttttcaatctaaatgaataacattcaagttgtgcgttttgaatttggctcaataacattgagagctcaatcggatatagatcgaccggagccttttcaccggacaacgagacgacgtgtccaaagcaacgactcaatgccaaatatgtgagaatgcgctttacctttaacaattaaggtccctttgaatgtgagctgatgaatgtctaggcacgtatacctagacgtggaaagtctgaagtcaaaggcggcggagtcccgcttagcggccttaggcatccatcggcagccgcgacatgttttccccgataacaacattcgctctgtgttaggcttaggcacaacgctccggtttatgcttttcagcactcatcgcaagatctcggacacatatatttgtgtaccgtgttgtgcgcccttaggagttcacagtttctggggctccgacagctcaccgacgggcggtcattgcataactccgggattggcttgctctgctagtgatagtgttagctctgtggcaagtaaggaattgcttcctggagcttggaaaccaatggagcttgtgtcaggcacgtcttcgagagctgatactactgtacagcgttcgggcaagctgtaagtctcacattgacatttgttcttcatatgtggggtacattggttaataaagatattgcagggcttgtctgggacacccttgactgtggaatcactgtcaactgcctatactctcttcaggctctagttgtgcatcggatatcaattcacagccagtatcgcatttggcagttgatgcataaatcgcatttgagacattccactctttgaagtatgaagacaagtggaccttgcaagcatcgaatttaattaccatatttcttgaatataggaagttacagggcggtgtgcagttcaaacaatattggggcttattgtgcctcagactggctcttgatattgcctattgcctactttccttactcgtttacttacgactccgccttatatcttccatctccatccttcatctctctctttcacaacaatcttcaagcttcttcgtatcacttgaccccgctatacgcctttggcttcagaatcatcttctcatttgctctaatctgttatcggtttcttgtgaaacccactcaattactgcaatgtctggcaaccagcccgtctcgcgtccgacgtgtctgactggactgctcacccagccactgatcccaagtcctgtcatcaactggattcttccagcgcgtcttcgagataaagaccacaacgatgttgttttcattggagagcggcgaattcaaatcaaggaagccctgcccaatggtcaccttcaagatgttgtcgaaaaatcagatctcgaaggctcgctcatcggggcaaaggtcatcaatgtaagcactcagttgccctgggaaactcagcctccatcaagcttgatggctcaccctcacgacaaaaatcaactcccacctcaaattcttttccttgctacggactcaaatgagctccttttcatgtactactcagagattggagatggcccatttgtttcctacagtcgacctttgccccgcgatgtcaacatagccgacaagtatggcaagcatatagctgttgatcccaagtaagtatcgcccattgctaactcagttggatcgacgaaagcttacaccatgatccaggtcgcgcgcggttgcagtcagtgcgtcgcgtaatttcttcgcggtcttgtggttaaaatctcccggcgaactccagatgcagatggcccagggaaagctgaacccaattgaatgcgtatgtcccagccatattttattggtcgtttgcctgataataacaatcaacaggaaagcttcgtacaagtggagggcgatatcctgttcatggaatttctttacccaaaagacatcaatgacaaacggaccattctacttcttctcgtctataaacttggcacaacacggtctatggtgttcgaatgggatgaagccagtatgctcaaccgcatgattcccaaacacacctcaatctttctgcctcaggaagaccagttgcctagcatggtcatccctttggctaaagaatcctcctacctcctgattaccacaaattccatggcaatgtacacacccaattcctcgtctcgtccgatgcgatacccaccaatcattccagatgccgaatcgtccgaagctggactgtggactcgctgggccagaccttcgcggaactggatgtacagtcagaggtacgatggaatattcctttgtcaagaaaaaggctggatctattatctcgagtttggcaacgatggtgagctcgaaacccagacttctctgggtcaactccactgcgatgttgatacggcatttgatattcttgatatgggccatgaaggtggtgacttcattctcgctgctggaagccagggtgatggcggtttgtttgtccaggaggcacgggatcaccccagatgtgttcaacgattcgtcaactgggcaccagttcccgatgcagttgttattccctcaaacacctcaggcatcttcaaagacactccatatgaacacgatcggatatttgtctgctcaacctctgcttcaggcaatggtgctatcaccgaacttcgatacggcattgaggctcagattggagtctcagccgcattgggtggattgtccagcatacgtgatatgtgggctgtgtcactcggtgctaaggattcaatatacctactagcctccgacccgctctcgtcgttgctccttcatacgactcccgacatgagagatggcattactgcccttgaggatgatacaggtttggacatccaacagactttggcaatggactctacaccttccggtgttattgttcgagtcacagaaagagctctgcacttttttgtccctactgatttctctctcagcagctgtgttcaacatgatccccttgtatctgtcacagcagctattgtggacggcccaagttccactattgtcatgactacaagaagtaaaaggggaaattttctccactttcttcggatagtcatgactgaaggacgtgcctccctatctgatcatgaagttccataccaactccaaaaagagcccatctgtatctcccaccagaattggggggaagttggcttcattttcctcggtaccagcgatggtacagtgctatcattcgaggtttataacgagactggtggaatcagacaacatgccgacactcgtatctcagtcggacgcgagactgcaaaagacatgtcagaaacgattgaaagcctcgctattatcaatactatctcaggcggtagaagccacgcgctccttttatgtgggcttcgaagtggcatacttgttccattcaatgtagatacaaacgtcgttgatcatcagggtgaccctgtattcggtttcaaacgtgagtcgtctttcgttcagcagactggtcccttgcatccctttcattaaccaggcactttcccttcaggtttggaacaaagagcgccacaccatcttgggcaaacatcaatcaacctcaaagcccacaataattttgcattgtttacatgcggagatgatttctggcgtgtgtcatgtgccccgaatggcaaggacttggactgtttcttgtctcgcgtttgggttacagatcaaaactgcgtaagttatattacatccttcccttttgagctatggtctaacattcatgccagcccgcatactttcctaccaggttcagcagcttcgaccttgtcgatgtaagagatcaagagtcagggattccaactacatacatgttttgttttgcggatggtcaacttctgatatgctctctggatcaagaagcaaaggtcgttcctcggcgcatcgacattcccgggaatccaagcaagctcacctactccgatcatctccaaagtctcattgtttcatattctgtgacccagaccggaaatcaagaaagtcctctcgatatttcccgcacggcatgtatcgagtttgtggacccagacagacagtcaccagtggtctctaccgataaaaacctggttgcccaaggccatctcccctggagaccacatggagtttctggtgagaaagtcacatgcatttttgactggatgccatacaaggatggcaatgcataccatcttatcgcaattgggacttcgatcagtttgcctcatcgacccaatgaccgacaaggtcgattgatgctcatacaagcgtctcgagatgccaacgatcctgggcagatcacttgcattgacaagcacacacaatggtttaaggacccagtttatgccatgacggcatacgacgatagcttgattgttgccgctgggaacaaattcttcacggtcacctcacgaaattctatgacgaaatgggttcgaaatatcacagctactcttccatccccagctgttgagatgacaatgcacggaggcatgatctatgtcaccacctcgagacactctctgctggtctacaagatctcaaacggggatatcttaatgcacggtttcgacccaatggcacgcgatggtttgtcgcacagtttattggccgggcatggatgtcaatcggatctccttcttgtgagcacccgaggtggagctactagggcattcacagacctcgatcaaccaggtgaccttgtgcctcgtccaacggccaatctccccgtctcattgatcaagctcactcgaggctacaggtctccagctgtgctgacgaccactaagaccttctatggttttggtatcaatggatcagtctacaggctcttgtgccttggtgcgaaggagtggcaccttcttcgacttctgctcaacatatgccttagggatgaggtcatctgtccctccctgtcccgcaggcaccgctaccttgatgcaatctcccaggtcgagaacagtatgcatatcgacggcaatatcctcgctcgccttgtcagtcgcggcttgaagcacctggatgaggttctcctggcgtgcaacgagagtcagttcaaggacctgactcctgaaacagtgcacatgttctttgaggcagttcgggacgtgcttggggttaatgaacaccatacccaggcggtttttagctggcttcgtcatattctacacgttgagatctaagatatgaagagtatttggccaaggtgaagaagtgtggagaaccaagcttggaggacatagccctggaggtttgagtcaagttgtgagagtgtatctatgccctagttagataaaatgttagtattaatgttcgaagttcgattcctggtagcttagcacatatgcgatatcagagatcctagggaaaaaaagcccctgacagtatggggcaactcagataggtttgtggttgtggcgattagaaagtcaagtccgatgccatattgttccccaccggccatgattcttcccgaaattcttttcccttcccacacccctccctaggcccacgttacagagagctctatctctcgcctttcattctggggattgtccttttttgacttctgacatcctgcccctttaatacgtgtgcgtattaatacaagtcgcaagtaaccggttaactccgtttgtgcgcccacaacactccaatcggaccaacaaaatccccaagggaaatctatcgcaatggcgcccaagaagaagagtaacaagaggcaggaagaggactgggaggctgatctcggcgagtccgttcccgccgccgctcccgccgacgagcagccccaagaagatgccaacgaggaggcagcgccggtcggtggccttatggctgctttgagaaaaaacaaagccaagaaggctaagaagggcaagaccaatgactttgtcgagggtgaggacgccgagggtgtcgatgctttggctagcaagcagcccgaggagggtaacttcgatgatgacgatgtcttcgctggaaagaagaccaagcccatcaaggaagtggttaagcctgcggcggaagagcctgagggcgagttccgagtaaagagtaagaaggagaaggagcgtgagaagaaggagaaggagaagcagcgcaagaaggagcaggtaggtttttacatttttcgccatgctggaaatacgtgccgggtgtccagctcatttactaatcggtctttctctcgtctacataggctgccacaaagaagaagctcacccctgctcaagaaaaggccgaagccaagaagactgccgccgctgaagccaagaaggatgaagccgccgccgccgccgccgcatctaccacagagactggcaagaagaagaagctccctcctcacctagcagcccttcagaaacaacaggagcttcttcggaagcaacgtgaggaggaggagcgcattgcagcggaggagaaggctgccgcggccaagcagaagctcctcgatgaagaggaagagaagaagcgtgcagaggctcgtgagcgcaagaaggagaaggagcgcgaaaagaaggaacagctacgcaaggaaggcaagctgcttaccaaagctcaacgagaggccaaggagcgcaatgaattgcgcatgcagcagatgattgccgctggtgccaaggttgctggcttagaggagggtggcgaaaagaagcagcgccctgtatatgagaacaagaagaagagggctggcaagaagcaggaagaggacctcgaagccgccgccgctcgagcccaggctcagcgcgaagctgaagatcgaaagaaggcggccgaggagaaggcgaaggctgaggccgccgccgctgccgctgctgctgctgccgtcactcctacggaagaggacgccattgaagactgggagcaggctgccgatgaagatgtcaaggacagctgggatgcggaatctgatgaggaagagaagcccgctcaggaggcaccttcccaaaaggatcagaaagaagaatccggctccgagtccgagtccgactccgacgaatcatctgatgaagattcatctgacgaagagcaatccgccaaccaaagggccattcaggcaagaaaggccgaggctgcggagcgaagaaagctcaagcacgaggaggctctggcggctcgttcgaaggatgatcttcgatcccctatttgctgtattcttggtcacgtcgatactggtaagaccaagctgcttgacaaaatccgacagaccaacgtgcaggagggcgaagctggtggtattacccagcaaatcggtgccacttacttccccgtcgatgctctacgcacaaagacccaggttgtcaacaaggatggcaagttcgagttcaaggtccctggtctgttgatcatcgatacccccggtcacgagtccttctccaacttgcgatcaagaggttcctccctctgcaacattgctattcttgttgttgatatcatgcacggtctcgagccccagactcttgagtctatgcgtttgctgcgtgaccgcaagactcctttcatcgtcgcattgaacaaaatcgatcgtctttatggctggaagaagattgataacaatggcttcgaagatagtttggctatgcagaacaagggtgttcaaaacgagttccgcactcgtcttgaggccaccaagcttgctttcgccgagcagggtttcaactccgagctgttcttcgagaacaagtctctgtctcgcaacgtatctctcgttccgacctccgcccacaccggagagggtgttcctgacatgctgaagctgctgaccagcttgagtcaagagcgtatgactaactcgcttatgtacttgtctgaggtcgagtgtacggttctggaagtcaaggtcattgagggtctcggtaccaccattgacgttattctatccaacggtattcttcgcgagggtgatcgcatcgtaatgtgcggtctcaacggacctattacaaccaatattcgtgctcttctgacaccagcaccgctcaaggagctgcgtctgaagtcccagtacgttcacaacaaggaggtcaaggccgcccttggtgtgaagattgctgccaacgacttggagcacgctatcgccggttctcgcatgcttgtcgtcggccctgatgatgatgaggaggatcttgaggaggaggtcatgaccgatctggagaatctgctgagtcgtgtctcgactgatcagcgtggtgtcactgtccaggcctctaccctaggctcccttgaggctctcctggagttcctcaaggtttctaagattcctgttgccaatatctccatcggtcccgtttacaagcgtgatgtcatgatggctggtaccatgctcgagaagaataaggaatatgctgtcatgctgtgcttcgatgtcaaggtcgataaggatgcgatggcctatgccaacgaaatcggtgtaaagatcttcaccgccgacatcatttaccacttgttcgataacttcactgagcacatggctcaaatcacagagcagcgtaaggaggaggctaagcttcttgctatcttcccctgtgtcatcaagcccattgctgtcttcaacaagaccgaccctatcgtcatcggtgttgatgtcattgaaggaagcctgcgtctccacactcctttggctgcggtcaggaccaatgccgctggtgtaagggagattattgatattggtagagtgtaagttttggttccctggattttttcccccttttgtctgatttctgacgcaatcgtttcacagcacatccatcgagcgcgatcacaaggctgttccagtttgcaagagaggccagccctccgttgctgttaaggtcgagggtccgaaccagcccatgtatggtcgtcacctcgaagagaaggatcagcttatctcgcatatctcgcgtgctagtatcgataccctcaaggagttctaccggtccgaggtatccatggaggaatgggctctggtcaagaggctcaagcccgtcttcgacattccttgaattcagtcttagggcttccttccggtgtgcggtgtcttcatatcaaaagtcgttagcaccggactcattccagccttgcggtacctatcctcaagcgaacttacgatcaaatgccagtaagtggcgagctttgttctccgtcggccctcatggccttcggttccatcatagccagtttggaggaaacgaatcgaaatttactaagctatgacaattgctatcgaaaaacggaaaagttattctattttgattacgatttgaacatacaatgaatgaccatgacttgatggatgaacagcgagagaggtcgcttgtacatgatataggaaaagcaaggcctggtcgataccagatcttttgtttctgttgttatagtggattgaactgatactattcaagtatttgcattagcgaacagacatttggactaccatgtagttgatctttatcttcaacgcagaaagcaagcagaagcaattgactagtttaggagctagggagatctgtttcttttctagcagagaccaaatcgaacggttgcttcacaatatcagaatagaccagctgatctactcttcaaggtcatattcagcattatgtatgtaatatgtacaatcctgttctcaaccgaccaaatcacctttggatatcaaacactcggcaaatgagcactatttcagcatcaagatttccctaactcaaatatcatccccctcccacctctcaaccttcccgccatgtctctcccaatccaaccaactacccatataaaccccgatattggcagggtcatatccagcctgcacggccatatgcgctgccgtcttagcccgcacaccagccttgcagtagaagaccatctgcgcaggctcgccctcgctctccacaggatcaggcttagggaacccgaaccgggtctcgaactcgtccggggtgagatacaatgcgtctccctgtgatgctagcgggatgcagactgcagatggaataatacccgtacctttgagctcggcaggctcgcgcacgtcgatgagaattatgggcttgtgagttggggagttgggggttgaggatgggagggcggcgttgatctagatttggttttgtcagcttattatcaatagcttcatggctgggttcattgtggtgtttggtccaaataaggaagtaatggtagaggaggaggaatgacaacagactggagagtacatacatcttcgaagccccattcctggagtttgactgggctggcctcatcgctgttgcaccgcgtctgcacctggcccagattcttggtgttccggcttgccttagcttgggtgctgcatgctggcgccaggcggctggggatgacacggttctgaggagaagtgaccagtcctctcgtcggtgcggagagagctcggtgcaaggccgcggctggtgataccgcactgcgtgccgagattctgactacggcggaggacaacacgacagcagatcgctggatcttcgatggcaatgtcgaagccattgtttcaactctggattttgattgtccgcggaggtgaggagttattacatctccgaacgtaacctcgggactgtgatgtcagtatctgccgtgggtgaccgcctactggtttaggcttttgttcattatgcgaggcattgtacaagctttgtcgagcaatattgggatttttggttggctagaacgattcggttgattaggttgtaactagggagggttctttagtagacagatgtttcgtttgagttttgcatagatcttgtagagatggcacagatatcacagatatatagtggagtgtatgtatatcaaatgaaaacctgtaattgagaaattcactaaaaccatacatagaaaaacgagtctagtcctttctctaaactcaaaaaggctatattgacctttaacagatatcaggtttaagattgtgataaaaacctcccaaagccaacctgtaaaccaagaagaaagactaaagagattaagtatataattagttgattcaagcacacgaacagttagataacatgtcataatattcaagcagaaaaagataattaatattgttctaatatgcatggctctaggagtagtcactctgaagaaatgaaacaagaaacccctgcgacccctcacgggcaataggtaatcataatcgcagcgggggctcctttggaaaagggtatggaaggtctctctaagagaaacatatgttaaagacttgtcctatatcgagcatgcatcgaagtcgaatgagagagaagaaagtgtcagcggaccatcccagccccaggacaggaaggcatcataagtcctctgtccagaaagtgtggctgggttccagctttgcttttgtgttttgtacaaagaagagaaaattcaagggcgggcgcggaacgtaagaagacagtcatcctgatatatattagtgaattgatcggggtagaaaataagcttgaacatacctgagggaaaatggtggcaaacaccttgatatcctcggactcgggagtaggggtgtgctcccagtccatcaccatgctggcctttccaatcatggacatcagggaaagctgagcataggtctgacccagacagtagtggggacctgtaccaaagaccaaccagttcttggtctgctgctcagcggtaccggtgatccagcggtctggatcaaacgagtcggcgttggggtaagcctcctcgtcatggcatgcgggccacacggagggaatgatcatcgagcccttggagacggtgacagtctcgctgatagggaagtccttcttgaccaggtagggaaccatgatgacaggggggcggtagcgcagtgtctccttaacgacggcgcgggtgtaaggcatttggtctagcatatccatggtggcggggagagtgcgatcaccgttgcggacgttaaggttctcttcacggaccttgtccaggatctcggggcggtcagccatcagctggaacaaccaggtggaggcggcactggttgcatcctgggaagcgaacaggaaggtgaagatagtctgggcaatttcgaaatcggagaattcacgaagaacctggctaggcttctctgaagaatcgacctgaattcccttctcaatcttctcgcggtatgcggcggaatccagctgggccttaacccaggcgtccatgatgcaggaaatctcaccaccagcagccatacgggccttggacttggcagcacacttggtgaactcctcaagtaccatatcagcggccttcttgccgtaccaggtcttagtgtagggaaggatgatagggaagttcaccagctcaagcgcggcagtaatcagatagtagtcatcggcaattttctggacgccctcatcagtgatatagtaaccgacaaaggtacggcacgacagagcgcacatgagctcgcggaactcggacatccaaggggtcggggtgaagttggtggcggcggacttctggaggaatttctcgttgtaggagttgaagacctcctcggagcgggggaggtacatcgccagagcctggcgagtgaacaacccgttcagacccttgcggtaatctacatgggctttgccatctaagaagacccaattggtcttgccgagaagcttgtgcgcggcatccacgacacagggcttgacatagccgggcgagttgaaaatcttccgggacatatcacgagtggatgcaatcacgacgaaccttagtagaaagtgttagagaacagacccgaaagaaacaagtacatcagggacttctcacttgtggaagaccgacacacagctgaggtctccgctatcccatttcgccttgtattcggtgaatttggggttgactgattggaggaatgggcccataaagggaatcttgtacatagggccaacaatcgcacccttgaggtagtggtatttgactgcaaatagggggtctgaattagtttcaagacgcgatttcaaaggccacacatgtcgcatttgcactcacactgatcatagatgacggcggcgaccaagaaagtcaacatgcccttccaaatcgtgaagccatccaatacggtggcaatgagaccggccggcgcgaaaagttggggcgagaccgtcgcatccgccgatggcgaggcaaagctcccggtgaagttggccatgttgaccatactggggagtcaacggagtcaaagttccgggcaggaattgaagagaaaagtaattgctaatgagaaaggaggaccgaatcccagaacaaaaagggaaaaaagtgagtggagagagaggggggagagaactgactggggctctcaggggcgggaacgccaattacacggaggcccccgggatgctcagcattagcccatatcaatgcataaatagtttgtgtttcgaatggtttacgaaattaacatacaatagcttctgtaagattggattcttatgattttattgattatttgtacagagatattcttacgcccaagttattatttggacaatctctgcttaggcccatagttcgggggttcttagtactaatctccgagccggacttaatagtatcgaagatgcgcaaagataacgaagtcacgaatagcctagaatgagatatgtacatagtatggagtacctacagctacacatacaataggacaactatatatgtacgtactccgtttgtatcttaaaatacagacaagtcagcgcaacgccatatcacaattactcagcacgacgtgaccccggctagagaattcccgagagttagatcggcgctgattggttgaacgttgattggctgaacatcatgtaagggctcctatatgcacgtgcttgtgcttgctactacaacgtacatgtcgtactacttatgttgtacatattcacgataggaatcaatgggtattcataacatggcatctatgtaaggggcttcagcgaccaccgaaaccaaaccatccacgacgacctttcgtttcttcttccacgggaccttgggcttgagcttgtgtctgagtcagagcctcctgtcgctgaccaccttcacgtgggtaatcaatgtagttccatgccacatcaaggaacaagggcttgacaggaatcggctgcatttgaggtggatacggtaccaaattattgaggtctagtccagatcctgcaaattgttgcagtcgttccaccactggccgttggctcgactgtgacgcctcttccgcagtcaccttctccagagtgacaagtccacgatattgagcaaccagttctcgcaaggttgactccaaggtactcgcttgcacttgggatacgtcgagctttgggacatcttcagcatccgttgctgactggggggaaacggaagcggcaaggttcaaggcttgggaaaacagcgcaagagcctcctttgatctcgaaagcactccatgggatcttcctaaagcaagacatctacaatgaaaaaaaattagagattagttgcgaaaatcggtgaggatcatggtgagaaccatacctgagggcacggaagtagtgccgctttgcctctagaccctgcacaaaggccgagtcggccgcaacacccggaagctcgagaataaattccaagctctggagtgttgaatcatacaggacgacccgctcacggagtctattcaacttcttgccattgcctgtggtgtgcttcgcagtttcctttccacttgttgtgggttgctgttcctcaaatgacaagccgtccctttctccacacaacacccggttacgaccgacccgccagccaaccaaagtgtaattcactgcggttcgagtgatttgcagggcctgcattctcttatcactgggatcaacaccctcactagccaagtcatcaatggcggatttcgttgcatcgacagcatcctgactggcaataatcacgttatcatacgcagcagctttctccttagcagcggcggactttccagcatctgccaaccaagtagtgagccgagcctccgcggctgaagcagcagccaacgattgagaaatcgaggcgtcgtccagtgggacagtccgcgacctccaagtgacagattggggcaactcctgcacttctccctccgcagtgcgtcgagtaccggctgcttcttcagcgagacaagaggggtcgatcttctcaacctcagcgcaaatctccgaatccgacgggaagaattcaatcgccagtgatgatgtgggtttggaccggggaagcttcatctgataagccgcgtatcggagactagggtcaacagtcccagagaccaggtcccggaaagcgtctttcttgaccctttgacctaaagctgtgtaaatcactcttgcaatggaatagtcctggagacactgttcccatctccgcttctcaagccacagggtgccagaaatcatcgccaaataagcccgagactccaggatatccatatcacttgccccagaaagcgattgttcgtgaagcagcgacactagatgctgtgcatacccagtggccttgttcagtcgcgaaataatgtgacgccgagcagcaccagagatgccctttgcggaagtatctgcggaatgtgtagacttcatgtgcattgcttgcgcccaagctcgttcggaactaagaagcaaaagatgtacgtatctggcgtgggttagaaactaatcgaaagagtaactgggactggaaaggtaagcaacatacgacacattgcttccaagattctcagcagtcacagctggtttggcagtatacttgcggcctttgacagtggcctgaccaagcttcttgcggagtttctgcagttttctggtagtgtgcgcccggtaggcattgtagtctcccacaaggagcgcctcctctctctctttaaagataaagtcagtcacctccatgacacttttctgtcttgttcctttatttggggtcctagtgatgagaatgtgagggacacggttgaagtagtgggctcagcaaaggcggtgaaaccccggcaatttcatgcacctccgaatcttttgctttgtgttctccaagcttatgggacctcggatttaccattgtctctttgttcaaatcaaggtgcttggaccttgattggcaatttatgtccggaacctgtgtgtgagcaacattgtgtttcacaagccgaagagtccgggcttcctttcctggtacgaatggcaccaccaagcacaacatgctcaattgcttgtcatactcaaagttaggacattttgctgacagaataattatccagacagagcttttgaacccaatacaatacagacgacggaattatagcggcatcttaccgcttgaggctacgattgagggtgatgctcgaacgtgcaacaagctcccttgagaacgcgggacggcgtttccttcaagactccaatggtgtgatccgaaacggaagctgtctctctggtcatttttggaagcataccggcgttggagcgaatgctcctcagtggttcatcgcgcttttgcaggcgtcaggccaacgatcgtcccccgttcttagcactcaacacgaaagcagagagtcaagcgatgggataggcccatcactcgaattcttataccctcagcaggctcaaactttagtagcttcgcgtctgcctcgctcccaaaacaggactgggtttcggaggagacacttgagcttttcaaggtcttatgtttctctttcaagtctttgccaagctccatcagaggcttcatccaggcatgaatatgcaccaaagctggcccaagtacctcaaaatccagaatctctccataaggacggcgaagcgagcgcatccctccaggcgttccttcaggagaatggcagcgaatttgataaagcttgggtgctgtacgttgcagctggatgcccgtcgaaactcaagtctgcactctgtgcttatatgagtaaatcaccgaaaaaaaaggatcaacgccgagcatggacactcttcaacgaaatcgcacccaaagatcgcactgacttagacttcaagaacatcataaagtcacagattctgtcgctacccgagaatagaccccagcatttggaggagatctgccaggaagccatttccactccatttgcccaagaaatcatctcgctgggcctgatgcacatgatggcaaacagacagtggtctaaaattatctcactctggaagaagctattggcgacccgtgcgaatgagcgaccaccattggacttttttctagatcgatttgatcgatttcacttccctgattattccctttcgaggcatctccttgctttcactgcgcacctgataagtgccggcacggttagtgcagcagcaaatgactttttgcgccgtctaattgagcgatttattagctctgatgacatggtcatatccacaccgattccgactttgcttgaactgttgcacaaatgccgtcctcttagtctcccgaccacaagacactatttcaatttgatacaagtcttcctacaatcagagcagaggccggaattagtcaagtgcattcttgtttaccgctactttcgttcaagatttccggatgaaaggatgcacctcaccactattcgtgctattactcaacgcgtggtgaaattcaagatgaccgacagcatgctatattttttggacgaagaggcgcactttgatgaaaataaaagaccaagcatgttgtcgtacaatgaagccatgagtgcattttcacggattggggatgtacgaactgtccaacacctgtttgataggttcctggcagatcacggccacccaaagtttcatgggtcggtgaccccccttcttgctgttcacgcgcggttaggtgatgtgcgcgagacacggcgacaattcgagcgaattcctacagaatttggtctcccggtgaacacaatttgctggaatatactgcttctggcgtacactactgccaaggatttatcgggtgctctttctctattctcagaaatgcgagaaaataaagtacccttcaactcgtacacatttggcacactgatggcgattttcgcccagcgaggcgacgtcgaagcaatccgtcaattgctcaaagaggcgcagaaaagtcgagtacaaatcacgagaccaatgattgaaacggccgttcaagcatactgcaagaatgggcaattggcccatgcagaagagcttatcgcactgagctgggatttagcggtgggagggtctcccttgcgaatgtggaattttcttctaatgcggtatgcattcagggtatcaaagttttccttccgccgtgtccttgaccgcatgggacgcctaggattgaaaccggacgacatgacttacgcggctgttatgcttgcttatgtctatgctaagcaggtgaatcgtgcgcaagctaccctcaggaagatgcatgaagctggttttcaagtcaccgagcaccattattctattctcttgcttggatatgtgaaggaacggaaccgtgatatggtgtatgtcatctcccgcgaaatgcaaaaacgcttcggtcgaatcgggatggaggagagccttttgagcctgagaatgcagattgcgagagacgtggagactgcaaaggatctcgaaatccctattgaagatatcgtgttggagaacgcagaaaagacgcttgctgaatcaatctcacgattcaatgccaatccatcgccagccaacagtcgattatctagaccgttagagggctttgctgttgagtctttcactgccacgcactatcaacggctgatcgacgcatacggcatcgtaggtggtgccagaaaagcactcgaaacttttactcattacatgcaactcagacgaaccgcgggattatcggacggcgatgatttgaaatctttaccgattgacttcgtcaaagccgttatgaatgccttttcagaaacccagaactacgagaaagtggaagagtgctggaacagtattatcgcaaatgcaaacaaggcagccggtacctgcgaccttgacaaaatcttgtcagcaccgtcgccggagtcaacgctgccagcatcagatgtgtcctctctcccgtcaattttttcaatgtccactcaggcagaaaagcccaaaatcattcctgctcaacgcttcatcctggactatccactttcgctttacctgcagtcgttggctcgacgaggcatgttcgcgaaaatgcatcaagttgtagccgaagttcaggcagcaggctttgcattgactggtttcaactggtcaacttacgttaggacgcttgcgacatctgatcattatcctgacaatgtggaggcatttagacttttcgaagagaagttcattgttcatttccctggttggtcgtggtttctcaaaggatatggtgtgagaccacttaacgcccccgtgacaatcctccacctcgaaggtcgcgcgggtatcaccaaatctcgcaggatgatgggaaagttggcccgaaagcattggcgcaaaatcgaccccggttacatgcaccctcattaccccaccatggtgcaactagcgagcacattgcaacagctccggcaaaccagtattacggaggggaacgagcatctggccaatctctacaagattgcgccacagactgttgatgcccttgccgcgatgccaaccgtggctgataaatatcagggctccatacttcgcggcaaggcggcaaaacgcgatatcctcccacgcccaacccatctgtcctcctcgcactctggtgctcttggccccagtcgcgacatgcatgaacgcaccttcgatgacgcgactaaggaacctctcgtgttgagaaaagaccaacattccgagcccgctgtcaacaatttaaatcttactggcttactcgccgttcacgaagagggattattcggcccgttggcgagcatccttcctcgcgaggaccgagtcgacctggaaactacagttcacgagtatcgcgttacggcacaacagtggaaggaccgaatcaagcattaccacgaggttattgctatggcgctcaaagacagggatataccacgcgccgacgcccacaaacgacgtttggtcaagttgctatattccgacgtcaagagcccgaccgccaaacgacaactgttcgacaaggataatcgcaagtggaagctacaaacccctccctaccttatgttcaagcccattgccgggctccatgtaaaacctgggcggacgttagcgaagcgagcgtccgtgcgacaaagatacaagggaccctggacgcccagggaagaccagggcgacgaccgttgagcagcgtgctccattccatgtatagtgattgtaattttagcttgtttttatatatcatatttgtacaatacatcagaattttccacctttcattggacatcactggttgaatacctccaactacatagttaaaagtcttttgtaccctcctcttctaggacggagaggaagtagtattactaggccaaacgtccgtaatcacatgacaaggagtagctcggttatacatgttgatgtatgtacatctagtaaatattattgtcggacagttacaagcctataatttgtgagtagaatgatgcatttttcaccacggagtaggtaaacaagaatttaagcattagaaagaagtatggctagcagaaaattcaagaaatagcagaaagccgatacttaagatctcgggcagggtacaatcccctaatgtataggctatatcaatcccccagatctatgtctacttgattgaaaaataatgatatggtggagacaaaggtacacatctgaaggtaccttttgtatgcgcatccaatagaaaaggtacatcttgcatcagacccatgagcccgaactcccagaggagttgagcaggatgttgggccaagtgtttattttgacgtgggatacagagtatagaaaactaataaatatcgttttgaaggggaatttgaatagtgagattattttcagatagctataaaaaaaaaaaaaggccaacacacagcgctccataccatcaaccgaatggaagaggacctttcagacctcctcgacacccaccaggaccgaccgaccgaagtcagacgtcgagaccaggtcaagatcatcaccactccctagaccgaaacacagacactgcgaacagcacgcgtgacagtcgaggcgggagtaaaaaggtttcactttagggcatcgaggacatgtagtcatcagcaagggtggagattctgtggctcttttaaagagtttagaaaggggacgtctactctaaagtgattctttgaactgtgaaaaggtcagcaaaatgttcgatcacagtgaaaaaatggttttctgctgtatgggggggaagaacatacgtagagtcgcttgaaaaagagaagaaggtctgggggcttgggcttctttatattcctgccgggcacgctagtgctaagcgagattgtcgtgtatttgtctggtttgtctggtttgctttgtagaggaaaggaatgttagcaaaaagttcaaaatgccatgtccagtgaggaaaaccagaaggtttcctgctgttgggggggaggagaacgcacgtagagtcgcttgaagaaaagaaaagggaccggggggatggcggcttatatagcccagtgaaaaattattttctgactcagcacggcacgtggtacccgggggacgcgctttcctcgcgtgcaacttcacgcgttccactttagcaaatcgggaaatcccaatcggccctccactccctccttcctaccacactatattgcatcacacaccatggacggtttacaactacgtgatgaggccgcgcaggatcgcgttcgtgctgcaactgaatttcttgaccctagtaagtccattgagttatgtgttgtgatcccttgagctaacaaagttctttttttcagatgatgcacgggcacgcaggttcgtcgacctcgaagataaatgtgaaatatatatctaacgggctggaacagttatcgagcggacattgtggttatgctgaacaagggtgcgcgacgattgacagtgcgtggatctgcgaaattccctgctagtaggtgatgctgatgattttggacaggtcagcatcgatgatatcagagcacataatcgggagcttgccgatgggtaaattgttcctcgacaccaaccgaaaccgggttcaccgactaacgggtataggctcctctcttcgccgttcgattattcacaagcctttgatgcagctttgaaggcggtcgttaaaaccctacccggtcgaccactcaaagaatcttcagatgaagcggtgtgtattaggttctcaatgattcttagcagacatggaacgtctaacaatatcaatagaactactactgcgcttatgttggtgcattcggagaattctcttgcaatccgcgcacattgggctcggaacaattgaaccacatggtctcgctcgagggaattgtgacaaaatgctctctggtacgccccaagattattcaaagtgtccactacgtcgagagaaaggatcggtttgtcgccagaaaatatcgtgatcaaactatgagtgccagcggcgcaactagtttgaacgtttacccccaagaagacgacgaaaagaatccggtgagtttagcctggacaatctcactcaatcagttgaaactaatgatagaatatctagcttattacggagtacggctactcaacatatctcgaccatcagtcgatctctatccaagaaatgcccgaacgtgccccggcaggacaattgccccgaagtgtcgatgttatcttggacgacgacctcgtcgacactgccaagcctggtgatagaatccagttggtaggtatctaccgtaccctcggcaacggaggtagtggctcgtcgacgttccgtacagttgtcatggcgaacaacattgttcagttgtcctcgaagagcggtggaggtattgcggaggctgtgcttacggataccgatattcgaaacatcaatcagattgccaagaagaagaacgtgtttgacttgttgtccaagtctctggctcccagtatttacgggcatgaccacatcaagaaagccatcctcctgatgcttctaggtggaatggagaagaacttggataacggaacccatcttcgtggtgatatcaacattcttatggttggtgatccgtccactgcgaaatcccagcttcttcgtttcgtattgaacaccgcgccactggcaatcgcgactaccggtcgaggttcctccggtgtcggtttgactgctgctgtcacctcggacaaggaaaccggcgaacgtcgattagaggctggtgctatggttctcggtgaccgtggtgtggtgtgtattgatgaattcgacaagatgagtgatgtcgatcgtgtcgccatccacgaagtcatggaacagcagaccgtgacaattgccaaagccggtatccacacaagcttgaacgctcgctgcagtgtccttgcagcagccaacccgatttatggccaatatgatccccacaaggacccgcataagaacattgctctccccgactctttgctttctcgtttcgatttgctatttgtcgtgaccgatgatattgaggatgctcatgaccgaataatctcagagcacgttctacgcatgcatcgctaccgccagcctggcactgaggagggtgcacccgttcgggaacagctcaatcaaacattgggcgtcggaaatgaagatcgtcaagactccaacgcgccaagtgaagtttttgagaagtttaatgtgatgctccacggtggtatggtcaacgctaccaatgctggccgccgccgtggcaaggatgtggaaattattagtattcccttcctcaagaagtatatccaatacgccaagaagcgaatcatgcccgtcttgaccaggggtgctgccaaccacgttatcgctgcatactctgctctgcgaaacgatgaactcaccggcaacaagcgtcgcacatcgcccatcacccctcgtaccctggagacactgattcgtttgtctactgcacacgccaaagctcgcctgtctaatcgagttgaggagaaggatgctaaacatgccgaggccatcctgcgcttcgccatgtttaaggaagtagtcgaggatgagcgccggaaaagacgcaaggtgaccaccttcgatgattcctctgacgacagcgatgctgaactcgacgacaactctgatgatgacgccaccgcccgcggcacctcaaccgccacaccgggtagacgtactggcacagcacgcacccgcggtatcgcaacgcaatctagtggtcctgtcccagacgaagacgaagacccagacagcctatacacagccagccctcgcgctcaacgcttgcgttcgagccagacagctcgcactcaaacccaaaccgactctcagatgtcaatggcatcctcaaagccagcctcgcaactcatcgagtcccagacagactcgcagtccacttccacagacgtcccgatcacccctgcccgcatgacagtgttccggcagactttgggcccgcttatgggcaagactgtgtttagagacagcgatacaagcaagattgatgagttgattaatgctgtaaataccgccatccgggaatcgcctcagcttggcgcttcgcacgtcttctcccgccctgaggctatccaggccttgcgagtcatgaatgacgacaatatcctgatgtatctcgaggatgatgaagatgtgtaccgggtctaatttacctgggttatgtggcactgtctatacttctcttctccatctggtaatagccagggggagaatgctggatctgtctgcgtccagttttacgagcatgctttcttgcctttgcattgggattgatatcagcatgttttgttttattttgtgtttggcgtatgggatgggtttgtgaggaaatactactgggtgggctcaatacgagaaatatgaatgaatactcgatccttgacttaaatcaagacctgaatggtagtactaggctcttagtccacctgcaattgtaatttaatgccacgctatgtgatttattagcagacacttgtttatttgacactataagatgcattggaatgggagttttccaaaggaaccagatacaacgcgacagcatacataggcgaggtactcgagcatgtctatagaagtaacgacatcgcgctctaaaggatatgcagcatacacagctaatgcaagttcccaaagacaacgctttgagcaacaatgtctggaaaacacgagagacaaaaaacagggtatagagatataaatggcggaagcatgaataatattccgtgctaaggtgcggtgcagtattacaattccggaacagaattcggtatagcctcctctttatctttctcaagcatacccataggcaacacagagtcgtcagacgagaaggacggggtacgtataccctctctgatctgcgcctgcgtgagaggtgacaagccccgccgaagcgtcgagcccttccgtttttgctgctgcgggctcgcatcctgcccggaggcggtgctcccgcggcggggcctactggaaggggaagagcgggaggggggacggtcttcgaagctcgtgtcgacgggggtagtgctgcgggatgacgtgcgggaatgagactcggagcgggtattgcgacgggagggaccccgctgctcttggccgagtttcgtgatgggatgatggccgtggcctgggcggtgttttgattcttgctcgagtgagcggtgcagggtccctgcgacgaggcggcgacgttgggaggcgcgccagccaagcccgagccggccgagccagcctccttctgtttgggcgaggtggcgctcgcgctcgcgcagtttgaggcgtagctgggcgcggcgctcgttttccttttcccagaagtcagtgcggtaatcgtcccagttttcgcggaattctggggagaacgacttgggcaggaggaggagacgaatgtagtcgcctcccgggctgaggtcttcttctaccatgccggactcgctgtcggtgccgttgtagtactgttgatagtgctgccgaccaccaccagcgcgcttatcggaggggctctgctcaacgaaatggtagtttccattgggggagggtaagaacggggcggagaatgggaacaggaatgagatgtaagacagtagctcttgccagaaggggccgcgaatgataattatcttggtgttcatcacgcgcaggccacgattggagacagcgagccagcgccgaggccatctgatccctcgttcccactgccctgtaccccagatgagcagtgcggtaaccaccccgccaagcagggcgactttctcccccatctctaccacccagtagacagagccgcctaccccgcggccatcttctcgcgggcgaaggaaaagggcatatgcaaaatgggcaagccaagcggctagtagaagtaggaagaacgtgttctggcggcgacgctcgcgcagggccagatattgggctcgtagcgaggtttcaagtattaagaggtttaggtagatctggggcggggaggatggcaggtgtgccagcgggtctggggtcgacggacgtggaggggaggaatctgaacggtgagcttgagacgaccttgaggagttcaacggctctggagttgatggggcgctcgcgccgggtgttggggcacccttgaccacctggtctaagggtgaggccatagtagaagagtcccaagatgatagtagaatatgaaagcaaagctcgttggttaaagtcaaatcaaaacttggccgatccggcccagggcgagtgtcattagtgtcattgcatgtgaagaggagagagaaaggcgggagggtgaaagccaagttggatcgacatcatctgcccagttagttgacttcacttttatacctacacaaatattgcccattgccattaacttaaggggtttccaccatatttgtcttttcatcgactctcttccttcggatattacctcttttgcccggagtttcgcatgtcagacctaccggggttaagcggagtgaccgaattgtctccgcgttccctgcttatacgtccatgagcgccaccgttcaacttttgctagcagaaactatctgtcttcccaatttgcgaatcgcaggcacaacttcgcgacttgcttctctcttttcagccactcaacaccaggccaaaccttgctcagccgtcttcgccaccctcccacgggggcacagactgtcttcaatggcgtcagaatcactcaactcgtcccatgagaacgtccatgggcgcgatcaacacttaggtgaaagcaatatcgagagaactccgggaacgccatatgcggctcaggctgctgctggcgcggcagcggcgcgtgcatttttcccgttgggatatcgagaaggctttagtcaatgggtaagctaacaattcaaaagccttccattaccgcatgtctgctgatgatttgatttacatagtgggctcgtatacctgcagctactgccgaacacaaagtcctctcttatctgccttacttgcaccaccagccccccacccacctccagactggaaaaacggcagagcttccggatggcactatcccgaccagtctcgagagcgcagaccctaatcaactggatgaagtcaccactaactcccttgatgacccttatggccctcgccgctggcgctctagcatggtagaactgagcgggaaagaccgtgcgctcaatgagttctcggtggagagggttggcgaggaagcagaccaacatttggtcatgctccacggctatggcgccggactcggtttcttctataaaaacttcgaaccactgagtcggttgaagggctggcaactccacgccttggacatgctaggcatgggccggagtactcgaccctcattcaaaatcaaggcaaaggaaagagaagacgctatcagggaggctgaggcttggtttgtagatgccttggaggaatggcgcatcaaacgaaagatcgatcgctttaccttgcttggacacagtctcggcgggtacatggcggttgcctacgcgctgaaataccccgggcatctaaacaagcttatcctggcatctccagttggcatcccagaggacccatacgctgtcactgcagatgtggccgagcctcgggcatcgacattgtccaacgagcttactcaagacgagcgagatataacttcgtccatttcggaaacagcaccgaagacaaccgacggtagctttatcactgggcgccaaccactcccggctgattccgcaccacctccagctccacgacggaatctccctaagtggttcgcgtatttatgggatgccaatatctcgcccttcagtctggtgcggtgggctggtcctctaggcccacgtctcgtgtccggatggacctctcgtcgtttctcccacctaccagccgaggaagctaaggcactccacgactactcgtactcgatcttcagtcttcgtggtagcggcgagtatgcgctagcatacattcttgcccccggtgctttcgctcgtagtcctctgatccaccgtgttcacggcctcgggagacaactgatccaaaacacaagcccccttgctcatccagccgccgccgccaccacttcgtcagcgccctctgagaatacgaccgcctctaccgccactccttcgtccgactcttcggcacctgctcggcgcgagaagggtctccctgtggtgttcatgtatggcgaccacgactggatggatgtctcaggtggtcgtgcagcagcagctatattggaaaaagaaaagcggaaagccctagaaaatgccaccccagaggagaagcgtaccgacgaaggttcctctaaggtggtcgttgtgaataaagctggccaccatttgtatctcgatggctgggaggagttcaatgatattgtgctcaccgagatggaagaggtcaaccagagggagagaagtcgtcagtaatgacgtggataaggcttctttccctttgtcgtgaacaacgacctattaaatttagagctggagtgtgatgttaaccttcgtccctcgtttattgtggtatttaatctctcttttgcccctcgtgttatgtgcctatctccctcttttccgtggctataattctgtacggtgcatattgactagatagacttggacagaataaatgacacttgccatgaatgctccagtcggagaaacagctttcatgcatttttcatttgtgctctttgcgcctcccccccccaaaagaaaacacacttcattcagctcgatcaccagcagtcagccctctcgaattcagtccaggggtactttgtctccgatgcctagggctagtgggataatgtgccatcaagcgtgctagccccaccgatggagcatcacgctcttccgtcgacagaccaatcccgggagtagtatacccactagcattgggactaaccctgccggagagaatatggctgctagaggacccagggcgcctcaaagaaaagtacccacccccgccaaagctcccgccactactattgctcccgaagctgtgacccagcccatccccagaggtggagagatatgagctcgtgaatggtgcatcgctggcagggaaggcgcgcgggagagcccccgactgagaatacgagtttgaatccagccgcaggtatggctggggcgtcataaacggagcattgagtcgcgctgttggtgacatcatcgactggctgtactccctcgaattaacagcggcggtatcaggcctgtttgacagcgctagggagagtcccatgcccgtgcgacggtcagaggtcgttagcgatgaagtagtgagcgaacggcggtggtgtcttgacccgtcttgttgctgatcggggtagatgccctgcgaggcccttgctcccgtcggcgattggagattgcttcggccattacgccagtcggtgctttcggggctgtttagggtgctttcggcgtggacacttgtacataacatgacgagttgcgaggggagctcgagacggttatttagagatagccaggctcgttcgtctgcatcaatgtctgcgtctagattgatgtcaccggtgctatgtatcgaagaggacgaggccgagcttgtcgctttcccgtgcagagtatgcgagctgcgtgttttggatgcagggtatgagcgccatccaccgacgccttcgaagtctcgcctttcatcgccgcttacaggcaggccgcagatgggcgttggggtagacaagttgtgggcctcgatcatgctccgtgcataagagttccttttgcggttttctgggtcatctaaactgctaccaatggaccaagaagtaagagggtcatttatctttcgtggatgtgtcgtcatttggctggagttccttcttgatctactactagctggagtagtaggttctgatgccgcaaatgtcaataatgatgaggtaggtgaggttggcactgaaaagaaatgcatgaacaattcgtagaatagctcaatacagactactgatagtctgagtatcaatgcaaagagcgcagcggatattgtaacccatgctgagaaaatgagtgggatagagatgatggccaggacaggcagcgcaagcaatgttgatagagagggccacatcgaggagtcaatctatatctccaggaagtggggaaaagaccaaaagcccatgattatacgacattcggtatttaagaccacagtcatagcataaacaacaaattgcggagaaagcatgtgatggatgccccaggcagcacaaacgccaattacatcatttcgctaacttcaaccttgttgtatatcagaaacttagaatctagctttggaggccttgttctggtttccattgaatagcccgagacatgccagaggatgagccgttcccttgggacattggcgtttacgatgcccactgtcaccccaccgacacattggcctcagtggccgacatcccgcaaatgaaagcgacaacactgacaatcatggccacgcgcggggaagatcaagatctcgtacaacaaacagccgtgtcactgtcagccaagacaagccaatcaatggcagaccgcgtagttccctgtttcggatggcatccgtggttctcgcaccagattttagacgacactacacaaccaacagctgcacaaaacccagccgagcacaagtccacgcactatgccgccgtgctagcaccatccccagccgatgaccaaccatttgttgatttacttcctgttcctaagcccctctcagaactaatatctgaaactcggaaccgcctccaacagttccccaatgcgctagtcggcgaagtcggcctggacaggtcattccgacttccgagcccatggactccaaccgacatcgataacagagatgaccagcttacccccggctcacgagaaggccggcgtctctcaaactaccgcgtcaagccggaacaccagcgcactgtactgaaagcgcagctacagctagcgggagaaatgaaccgtgccgtctcgctgcacagcgtgcaagcccatggcggagtctttgaagtgcttaaggagctctgggcaggacatgaacgggttatgctgtcgcgacggaagagggacaagcagcgggatgcagaaggcgccgtgtctgacgacgatgatgatgacaatgacggagataagacgttggaaggatgtgtgtcgactaaagcatctattcccaaagggaaatcgtatcggccgtttccgcctcgcatctgcatgcactcgtacaccggttcggttgagcccattcgccagttcctgcatcagtcgaatccgtcggatgtttatttctctttctcgaaacttatcaatttctccggtgctgctgagaagaaggttggtgatgttatcaaggctttgcctgaggatcgcattcttatcgaaagtgatctccatgttgcaggcgcgcagatggatgagttgcttgaggatgtggcccgacaggtttgtcagctacgtggatgggagttgcggcatggtgtacaggtgcttgcagataactggcggcggtttgtgtttggctaggtcttgcgtttcattttcctattcctgcatgggttgagcatgggttgaatttctgacttgttgcactttcccctcgcggtttttctaagcggtgcaattagcgaacacgcatatatggcgcgactggatcgctcttgtacgtatatccatggatattgcctaggtaattcattgagacataaaaaggccccaactgatttgacccaacatcactatttgcagttatatgacgtggtatatctctatcattgtatgtgattgtttgtgacatggtatcgtaggctgggcctgtacatgtctgtggcctgacatggtctctaagatgtatcgtgtagctgcgtgccctggcatggctcgtctcgtcgtcaaattagaaaaggtatccgaagagtaggcgatggagaagatgacagctctatatatatagtcatcaaccagaggtagcgggaaaaagctaattatgcagccatcctccatcgtgaataagatctgccatcggggcatcctgccagtagatctgccgccattcatcttcaagctcgggcaaaccttcaacgcccacagggggaggtaggtctacatcaccgaaggcgaacagctgtcgccagtccggatagtcgcgagctggctcgatggaatccacttgcatgctggctgaaaaaggatcgttcctttccagcgggccaacattaagccggagaggggcaatccaattattaaattgagggttgggttgtggtgagagagtcgtttgttggagaggggtagattcgggggtgggcaccccgaaagagagtggcccgggggtttgcatggtaattgatggaacaggagaggtaatgggcatcttgtgcgcattatgagtgtcgttgaacggcttgggtcgttctgtggttgccatccgaagatcctcttgcagacgtttggagtcctcgaagagtcgcaggattgtaccagcatgaacccagtattgagctaattcgcgcagcgagtaagaggcagaatcgaagcggcgtaaggcattgatggcaagaactggattggagaagcggagctcaacccggacttgaatcatggccgtgaagagggtatggacgccagtgtaccaaaggaacttcaagcgctcgtgcatcctgagctcttcaaatattgaggctataacccctgcggctgcactgcaaatttctgcatcgtgagggccatagtcatcagaataggccgaggctctgggatgaggccgatgcaacagaatgaggaagttgttgtaggtcaaatggagcatagcggaccaaggatccatatcagatgcgcgaagccgaagattatcaggaagtttcagagaccaggttgccaatgacccatcagcttcttgaagaacggcctttcgccgttctttactttcccgnnnnnnnnnnnnnnnnnnnnnnnnnnnnnnnnnnnnnnnnnnnnnnnnnnnnnnnnnnnnnnnnnnnnnnnnnnnnnnnnnnnnnnnnnnnnnnnnnnnnnnnnnnnnnnnnnnnnnnnnnnnnnnnnnnnnnnnnnnnnnnnnnnnnnnnnnnnnnnnnnnnnngaacggcctttcgccgttcttcacttgcccgaagtccaaatcgatcgcgaatgagatacgagatcatcgtacacagttcggtaaaatggatcacgtagtctgcttgtacaagaggaccgcaattctcaaaatcagcgagcgtcaaaggagacacatcagaatcgtctagattgctaaattgaaagttgattagtattcgctgcaatttggccgtttggaacgacttacatcgcctgaggtcggccatatgacagggaaatcaacacatcaaattggaccagaatgaaccaaaccctccgccacattcgccgatcgcgagtcacaaatctactggaaacgggattacggtgcattccaagccccgtggcgatacgggcagcggccccaacccaaaagtgagcatctgcagcaacatcatcatctgcgctgtccgaatgccacgtcaaaagaagggccgcttgaacaagaatgtcgcgatttcgttcgatgcgattgtcaaacagatacttggtccgacggaagaaaatttctttgagagcgtctcgctctactttagcacgagaaacatgcgccccaactagcaaaatcgcttgaagaagtaggactggcggaggatctgcgggatcccggttccggtattgcgtcatgaataaatcttcgtcaatgatagggtaccccggattgacatatgtgaaataagcctggaccaattcatctgcgagagccggttctggaagtgttagagcatccataagaagctgatcatgaccggtcttcatttgacgccgtgggatctcgttgctcgcaaaatggtatacatcgtcatcttgttctcgttgttgtcgaaacaagaatgacatgttcgaatgttcgtgtccgacatagaaggcgcgcacgcctctttgtatctctctcctgccggattcctcctcgtctatcaatttaacgagatgttgctccatctccgtgtgtgcctcgcgggcatgcgccatatcggggcggccaaatgcctccgatcccgtgccttgctgaaatccatgttgcggaaggcccccagatattggtgtggcatggccgctctgaaatgcagttggaaaacttggtggtagtggtgtccccgctgcaagggtcgggtttgaagtaggatcggaggtgggtagaggccgagatcggatcggaacaggatctaggattgagcgtacagcaagacgctttttcttttcgtgtatgcgacagtcagcctttccagaggcgcgacagttggtacagggtgttccgacggtacgggcatcgcagcgaactttgcgccggtgacagtggacacaagctgcggagcctaagagttttttgagtcaccggtcagcaagtctgatcgcgcaaaaataaccgatcgccgagaacaaagaacaaagcccgcatatcaagatacataacgattaagcagataaggggcattgcttaccttgtttgcgcttgctcaccccatctaccgggagcggcgagggggcgttatcgttgacggaggacatgacaggagtaccattggcatcattcttccaaatcggccacgattctgcattattcgagtcaccaacaccagtcacttcaaggcatcatgggcgaacttcgaaatggttgccgaggataatgcgacaaacaactaaatcaagaaacaaaaaagtcgggaagttgaggaaactgcgggatcggggtctccggtggagactcacgtgggtgcggagaaggcgattatgtaaaaaatgggccaaatcttggaaatcgtatcacaaggtcatattcctccttgggagttgcattattgcatttgatatatcgtgttctccgttaatgcaaggatgtcttcatcttttcttaggatatcgctttggtggcctggatactactgttattccttcggcccacgatgtacatatttgcgatacattacggtgagccacagcgtcgtaggcaagcccgtgctccatgtgctcttcttgaccagatgaccaagagacactccacatctatcgcagcaatccaacattaaccaaaagaattattcaaggattcagcaatacccacttggaacaacatctctcccgtcctaacggagcaaacctggacggtagctgttattctggtggaggtcttcgtctatctctggctatctctgatacgcagagcctcaatgaatgtctaagccacatacccgatcagtctataaaccaggcacatcaagatgaacaataaaccagatgaacatattccctaaacagaacacctatcttaacctctggcttcaattcaagaatgggaaaggaaacaaacgagttcaagcgatcgagcaaaaatatctgtagatctctcacaccgacccccttttatccaagtattttccaacggttttagatctagccaatgaatgctactagggatcggacagcaatgcattcattatacggagtacggaatacaacatacggcctagcaaaacagataggaaagaaagaagaatatacatacggagtgggtcctatcacctactattggtgcgccacaacactagatgtgccctaactcgaacccctgaagatctacgaggctcgtacaacatacggagtatatcggcttcacttccttccggttgctgatctctaccattattgatctctgggctgacatcttcctcgggaacttaaacaagaggccttcatatacaattgtactatgtactgactggatcaatagggcagcattttacgcacggactttatgccagctcagctcttggctgccggcacttgatttaggatttgagatatttgcccaatactaattctcagaaaaggaattagattcataagcggtagtatcatactccgtacaccgtatcccctgttcgctctaattgtgaaggggtatttatctataaggctcttttgaagactggcatgtatgtcataaaagctaatcaggtccaaaactcaaagcagcgtcttgagtgtatgttgtaccgaggcatttcgacctacttgagttgcgcccaagctattcccaaaaatggcgaggctggcagccccatcgggttgcgaaagcttctcgttcttggccattaattacctctggacaacacccctgtgatctacgtacacaaatatgagaatggatacatcaaatgttgtataactacggagtactactacggattatgcactccgtatgagtacataactagttacagagcttagcgaattcctggcttagctgaacagatgatattactgatgatcgtgatggatataacgcgtaaatactgttggactgagtgttctatcttcacttcatatgagaaatggcacttctctgtgtgtatgaatgggctgacatttggtgcactatcactttggatcctcgtccattttccagcttgagtgctatttgatctcaagctgccggatcgcttacgggcgatattttctcagaacctattcactttgatacttccagacaatgcttccaaaattatgtatatagcatgagcacaccaaagagacactagtattgaacaataccattaagtctagcttgtccttccagacctgccttcataatcataccgaagatctccagatctttcctagcatccttcgaagtggttttagcgggcttaccatcaacagcaaatgcataaagctccttcatttccaatgtataagcatcttcgtacgtcttccgaaccacagactcacgaaatgagccatcttccagcttctcgcgaatgtgcatagtggtaggcaaccccttgacgtaaggcgaatcaaagcagaccttgacagtcttatgtccaccaaagacctcaatcgacgcatcgaaacgggggacatcatcaattccggactcataagacacagcaaaagagggatattggaagagggcactggagagggaaaagaattagcatgtttcccggagctgtagatataaaatttgcaacttacctccagaatgggggtcccttcgcagagcatagagaagcaccaagcacagccgtcggcataccaagagcctctctcattgcactaagatcatgcgagccaagacttcccaagtgcctccactgagcagcagtatcaggcgtaactggaatccccaattccgccgtcaaagcctgttcaaggaactcgtccgtcctcgtcgacaattccttcacgtcctctgatctgtaatcagagaaaaccttaggaaacgtaccagactgaccaacgaagtccgagttcgggccgacaatatctcgcacccgtgcatagcacacttgatcaaagcttcctatctccttgacggcatcgatgaagccactcgcataccgccgcatatatcccaccatgacctttccggaagtttgcttctcaagctcgatgagctggtccgcgtcttgcagagagagggccacgggcttctcgacgaagacgactttgtcatgtttcaggcctagtacggcgtggggaacgtggaaggcgtcgctgttggcaatcatcacaatgtccacgtccggggaggcgcagagctcctctgccttgcgagtcgtcttggggatacatccaatgaccttcttggcacagtgctcgagcgcattgtcggagacatcacataggtaggtgacttggaagtaatctgagaggaacccgagagttggaatgtgggcaacttgggtgatttcgccacatctagttggaatatcagcatcaatatggtacagcactttggcaataggcttcttacccaattattcctacgcggaggatccttttgccggtgttcatcttgaatgtgtgaggtgattcccagcttccccaatgacgtaatggttagggaaccttggaggttccaaggttgaaagctgattcaaacaaaagttcaaaaatttttgtgaacaaccaatatatcaggttggatgtctcgaatgtttcgaatgtttcgagtgaatatgctgggtaagttgaattgaagaagcgctgatctgatgccgcgaggtggaacagccccgccgaactttgctctcagacgctttttattagcacattggttgaatacgaataacatcaacactaagttcttgacaataagacatgtagtagacaagcaatcttgaatttactcaattagaatgtacaattgtagacttgtcttggtcctatactagacgccctggcagatcaaacccactaacttcaatacgtacttgttaggagtcaacttttggagacaaagcacaagtaaacatatcaatttcttgaaaaaggattaccttgaagcagacaaaaggtgagcatcaatcaaatctcaaaaaaacatgacctatcagcataatgacactggtcatcacagatctagaagctaggtgttatgatatacaacctcggtcatttgttgtcaagtcaggatcaaggccaacatccataagtatcttaagcctacatcgatgtacatgcatatctagctgtgtatgaaatttaaatcgttgaaatattgactagatggtgttagttaaccatcaattatggctttcttcaagtcgtcctgggctgatacctgcaaaacccaagactctgtcatctgccatcactgagctttgaggaacccagccgaaacactcaagattgggaacttatgggtatatctcttttactatgataaggagctaatcttgcaattttgacttcgaagcacacaccgacgatgcattatgtcttttgccgttcccagtaacgccggtaacctattgctctcacacgcagatagctacacccaggaacatgtaacttgaaagtatacaaagaaaaggaatgccactaaggctgcacaacctgaatgttgtttttcttctgcaaagtgggagatcaaagttagtattccgtatcaagtttccagaatatggtttcaggcttagaaatagccatgaaacaggggatgcgattaccttccaggtatccagctcatcctgctttgatttgtactgcttgagcatgtcctcaatcacttgtctcaacccgtccgagttggtcttgagtgtaggaagcacatctttgacagtgcgctcaactaaaacgccattcaccaggcgaaaacatttgcggtctgcggcaagagggtcgagggtttcaatcacaagtctaaaaaaaaatagatgttagcattgtacatatccgttgagacatctctggttgtgctcgctcgtggtgaactccccgattcatatcagcgagaccatgctgggatagcgcataaccctggaagtaactcacttgtgttcttctgcttcctgctcaatatcaccgatcttttgcgctaattgctgaagggtatttttgaagttggtgtattggtgctgaagctctagattgagggggttcgcatcagctttcgtgaactcttgaggtctgcaggggcaatagaaaaaccataccttgctgcttcttagggtcaatctgtttctggctagacatgatggctgtttgatatggcgtggtcggcacaaggaagcttgagaaattgggatgacgatgcggggcggttactttttggtgttggtggaagccactactatggaactttatgcacctcacaccctacataggcactttagctcagaatctcatatatgtatgctcaaatacccaagacaactccaatatcattaacagaattcttggtttaactctatactaccaattatatgctcttcatgaactaagttatataccacgtgactaatattgcagtgcagtgacaagtcgatcagctcgactccaccgtcctctaaaaaaaggttgcctcgggtcagcaaagctgcaaataagctgtctcctcgagaatcagaagctaaacactgctaatgacattgccatttcagaagattgcctaggtgactaccagggcggtgactcttctctggcaataaagggcggtaagaagataggaaagagcttcgactccgcggatcactttctcaagtcaacctcacgcagaccacaccgagtcgtacattgcgaataactcaagtctgaaacctggctcaccagcccggctgaacgacatgtctcgcaacgagatgggccctccggccaaaaggcacaagggctttggacacctccctgcaggcctgcgcgacgcaaaacggaaggacattgacaattgggaaaccaatcgaatgcttacttctggtgtagcgcaacgacgagaccatgagggcgacttcatgcccgaagatgaagaagcgactcgcgtgcatttactcgtccacgatctcaggccgccttttctcgacggtcgtacgatcttcacgaagcaactggagccgatctccgctgttcgagatccgcaaagtgacatggcggtattcagtcggaaaggaagcagggtcgttaatgagcgccggcagcagcgagaacgacaaaagcaagcacaggaggcgacaaatatggccggcacagctctggggaacttcatgggcatcaaagaggacgaaggagacagcgctgtcgctgtgcccatcgaggatacctacaaaggaggaggaaacaaatttgccagacatatgaagaaagacggtggctctagcgctttcagcaatagcaagaccatgcgcgaacagagagagtatctgcccgcctttgccgtgcgagaggatcttatgagagtcattcgggataaccaagttgtggtggtcgttggagagaccggatctgggaaaaccacccagctaactcaatttctacacgaggatggctattctaagttcggtatgatcggatgcacgcagcctcgccgtgtagctgctatgagtgtcgctaagcgagtcagcgaggagatggacgtcgagctcggtggactcgtcggatacgctatccgtttcgaggattgtacgagtgacgacacgttgatcaaatgtgagtttcttctttccgctttggtgtgatcatatagctaatttatgtactagacatgacggatggtgtattgctgcgagagtctctcacccaaaaggatctcgacaaatactcatgtatcattatggacgaggcacacgaaagagccttgaacactgacgtcttgatgggtctccttaaaaaagtcctgacccgccgcagggatctgaaattgatcgtgacctcagcaacaatgaactctgaacgattttcgcgcttctttggcggtgccgcagaattcgtcattcccggcagaaccttccctgttgatcttcacttctcgcgcacaccctgtgaagattatgtcgatagtgcggtcaagcaggtcttggccattcatgtgtctcagggcgctggtgatattcttgtcttcatgactggccaagaagatatcgaggcaacctgcgagctggttgaagaaaggctgaagcagctgaatgatccgccgaaactcagcgttctacccatctacagtcaaatgccggccgagcaacaggcaaagatctttgagaaggccgccccgggcgtgcgcaaagtaattgtggctacaaatattgctgagacaagtctaacggtcgacggtatcatgttcgttgtggatgcaggttactcaaagctgaaagtgtacaacccgcgcatgggtatggactctctccaggtcaccccgatttcccaagccaatgcaaaccagcgatctggacgtgctgggcggactggaccgggcaaggcctatcgtctatatacggaaacagcctacaagaacgagctttacattcaaaccatccctgagattcagcgaaccagtcttgccaataccatactgttactgaaatcccttggtgtgaaggaccttttggacttcgacttcatggatcctcccccacaagagacaatctctacctctcttttcgagctctggtcgctgggtgctctggacaacctgggtgatcttacatctctaggacgtcgcatgacaccattccccatggatccccctcttgccaagctcataatcatggcctccgatgtatacgagtgcagcgaagaaatgttaaccatcgtcgcaatgctttcggttgcaaatgtcttttatcgtcccaaagaacgacaggaggaagccgattcagcccacgagaaattcttcgttccagaatccgatcacttgacccttctccacgtttatactcaatggaaaaccaacggtcactcagatgcctggtgcatcaagcactttttgcactccaaaacgctccgccgcgccaaggaagtccgagaccaacttcacgacataatgatccaacaaaaaatgcccctcgtcagctgcggtacagactgggacttgatccgcaagtgcatctgttcgggcttcttccatcaagccgcaaaactaaagggcattggcgagttcattaacctccgcaccagcgtgactatggcgctccatcccaccagtgccctttacggtatcggccaagtgcccgagtacgtcgtctaccacgagttaatcctgacgtccaaggaatacatgtccacagtgacagccgttgaccctcatgtaagttaccactcccccattcatgcctgcttgtcatctagtactcaactaactcgtttctctcagtggctcgccgaactcggtggcgtattctactccgttaaagaaaaaggctactcgcagcgcgaccgccgcgtgacagaaatcgagttcaacaagcgcatggaaatcgaagagcagatggcagctgaccgtgaacgtgctgctgccgagaaattgcgcgagcaggaacgcaacgacccagcccgccgcagaacggaaatcgaggttggcggaaagtccgtcgtgcgtaaagctatcatcaagccaggacgcagggtcggcggtttgactgcttcatcttcatcttcctcgcgacctggagccaatatcgatggcgctcatgatggaggtggaaatcgtcccggaagcagtgtggtcaagaggcctacggtgcctcggagaccaggacgtgcattctagtcttggtcttggagtgaaagtcacaatttctgtcccctaataccccgatagatgtgctgtgcttgaagatccgtacgcctcacgtccactctcttctttcctctgcctgaaatcctttaggattttccaaatatattgacctacggtcttacgtgttgatcttgaatcacatttacgaatatcttacgacgtggaacgatgcgactaagctagtttggattgtgctattatgacaatccagccagctaagttgctgctagtcagttctagcaataaaagaatagagacagttctctgatttttttgagtgtatactcatttccctatgtaatcctaagttatcacgtagtatctaatagagaagctcttagagcttgtattcagcttgcttttggagcttgcttctgcgaaatatacttctaggcaggatctttgtcgtcatcacttgtgatatacttactttctctaatactccctttatcgtttgcattataatataacaattagtctaatattcgtttcttcttttacatccatctacatggaatttgttcaatcgatacccgatattgagttatcattcagctcccttccgagtacgctctgctctttacacccagctttctccgaggtagggccatatgaatagcatacgcttatccaacaagtcagccttgtgtaagcagataggtcaaatatgaataaaattttccacttcgatcaaagaccagcgtgaagaaccagaacaaggatcggctaaaaaaggtgcaacatggaaggatatctaagagacgacattccccatcccatcgggggatcaaaacgaattaaacccagacaggaaacagaatgagccagcatggtacatattgaacagaggcttttagcaccgggcacaactcagttgataaagttgacacagaaaaagtgtaggatcaagcttccgaagatgtaatcggcgaaggccctggaattaaagatcagcatatgcatccatcgtggccttggaaaaacaatcgtgaagctggatcaccacaaaaaacacaaaagacaaaaaggaactcacctttcatgtgaaatacccgtcccctgttcttcactctcatctacaaagcgcgcattcttccccttagagctcggctttgatccagaaccagtaccgctgtcactagtttgcatgcgcagacttgccgtaaggacgaattgaccaacagcagcactaaagccactgaggaaggcattgaagggctatatgggagggaacagttgttagttattggtatataaatttccaattgcaaatcacatgccgtatagacaagacaagggaaaagagggtgaagaaaagcaatagaaacggaatggtatttgcacttacatagttcccagctacaacacagtacacaaactgcaatccaccaacaagaaccaggaatgccatgaaggcatctaggaggagtgtccgctgcggcgttgtagatgcatactgctgccagacatgggtagcaatttcagcggctgaggcattggtcttgagggttgttgggcctgaggagagcttcggtgttgtgagtgcgggtgtgggcgtgggcgtggaggatgccgcggaggtagttgaggccgcgtggcgcttgggagccatgattttgggattagacggatcggtagtacttggttatgtggagttgtcgttgaatagattatagatatcaccgatgaagattttactgcaaaattggtgcagggagggtgggttggaggacaatggcggagtggaaagtggtggttgatgccagcttggagcttgttatcaccgtagtcacgtggtggagtagatcccgatttggaagtatacaatcaagtgataacgaatagtctattttttcgatgatttaatggtaaattcattgactgaggtattgagattacgttttcgattaacggttgtgtaagatattggatgtacagtgttgccacaacacaacgtcgccgatataatgcgtaagagagaagaggaatataataacagtgaggggaggggatatcaataaccaacgccataaatcatcccatcattaatagaaaaggcctcaggtgagaaatgaactaccatatatcaagaggctaagcaaaccattcggcaacattaccgttggttggcagagaatcgtcattttcaacatccatctggaaatcacgcatgacttgatcccattcctcccagttgagctgagtggtgtcaggaaggggagcctcattcaagaatgggtttatcatggttgtgttgtagggaaggcttgtgggcaagctcggtgccgagatattattctgggccggtggagcatcgaatatatcgtttgaagtagctaggatgtttatgccagggaacatatttcgaagagcacccaatggtccattgctggggtcatagtctgtatcagatgctgttgagcctggccgatctatcgagggcgaatttggcatccctattggcatatgaatccgcggaagagtatgattatgattgatgctttgaataggctctgttgcggtggggaatggtccaaaactggatatcaattcttctttgtgcttggaccgggtggcagcagctcttttcatcaaggcggcgagcggccgccacagcatgcccttcttatgtgtggcctgcatggcccattccgtgtagatcgaactgacagcgctccaagctcgatcggtaatagggcaaattggtcgtacgcatacctcggacagaacaaatgcgattccatgccattgcatattggtccggaacagccagccccatttggcggtcttgagatcagtttcaagcaagtggccaaactcaaggacctcaattgcagtcagaaacaagctctctctcgttgcttgtgacacatttccacgctcttttcgggtcattgggtgatggacgatcagccataatttagcaaggatgagacgcccaactgtggcggtgcaccactgcaggggaatgttcatatcacagtgcttgatatatcgttgttcacatcgatcactgataatttgaatcatccgtccagcacgatctatgggcggtaaactgttaggtgaacgaaactgggctccggggcacacgtaatttgctctccgtaaagcgctcgttatctcacagcgaatgaggcagaatgtgacatccgtgaagccttctcgctccttggggggctcttccatgtcaggcgacaggtcgtcgtcattgagatttaatggcagtagagtatcgtacatgctctcgtgaatgagtgggtcggtcccatggtcttcagatgagcggacatccaatagtgaaatatgccaccataatcggcgccgcatctctgtttcatacggtttcagagcgaaattgctgccatctcggtgtaagcctaagctctgagcaaggcgtaatacaatcgatgtcatagaccacacaaatttgctatcatcttctcgtcgcacacagactaagaataagacagccgcttgcagaaggaccaagctttgtgtattcaagaacccggcttttgcaagcgcttgctctgtagcaaacctgtaccgcttgacagcaatagttcggtcttccccgaactggaaccaacagtcatcgggcttcatgctgacaatgctacaaaggtacatggaaaataccaatgcctctgaatttttgtccaaggcatcagggttccgtgctgcttgggaaaacaggtctctggcagtcggtcggtgtacgatggtgactaaaggagccacattttcctggtatgtttcccaaagtaaggagaccttgggcattggggggtgaaactctcgaagagactttgaaagcgagtagaatccaaaaaggaaaccgtcatgggaggccgactgagaagactctggtgaaggtgtatcatcttcccccgaggacgaatgatcaaggatatcctgcagctcctctatctaaaacatgttaatatgaagtacgtcgaggtagcaaaagaagatgagcgatatctacctcgtccccaagactagtccagagccgattgctgacatatcggctccggccttcatcaatgactaaccgcccaaattcattctcaaacttattgggagcgagtttcttcggatccgaagcttcgaacggacagtgacgtccgccgtcaacctggttttgtggctcagtcgaaacagacgtgggcgcagtcggctcgctccgaacggtcgaagatccagtcgtagaaggcggcgcctgagtcgaggtcgatccaccctctgtatcaccattgcccctaagatgatcaataacaccctccaaacgacgtaaccgcgaaagcaactccgcatccggtggacgtttcgatttccgcggggcacggccaggagggggaaaggtgcagtcgatgccggctttggtacagttcgaacacggggatcgcttgttgcagcggactttcctgcgacggcaggtcacacagctgcgagaggtcgagctcgggggttccgtagccgcatggcggggaaaggtggcggccaagttcggaggtagtggagtatttgaagaattataattgacgggaaagggattcaactcctctggggaagctggagggaatgacatcgcgctaaggtaaggactccagtctcgcttcccacattctttgaagtctagtggttctagcaagaaataactagcaaaaatacgaagattgtacggagtgatctcataggcatcaaattatcgcttagggccctggacgcatgtgactgattagagttccaaaggctatgactcagcgcccggtctggccccgtcccgttgaggccaaaggccgttatctccgtttgactccggactccggagatcgtatagatcgtgataagccttgagaataaatacatgcttagatagtggtatatgtacagcttctatcatcagatccaattcaaatataccgacgccagatatatgcaagaaatcaccacgcatactgaccgtcacgctgaaggtgagataaataagcacttatgcaagcaatgcgatcggtggtccgctcatgcttcgtctatgtgcgcaggagtgagtgtaggggtgttcatgggtaagttgttaccgcgtgagcctcgtcgaagcgagcgcttgaatttacgcctgtagagcatcagtcaaccatcgttagatatgatagttataaaactcacaccgcggactcccaaatcttggtctgttcattgaagatgtgactaggacagttagttacccaaactaacatccatagaatggaacaattcaggactcacccataaaagctcgttcgtgtaagtgcctttgggccatactcttcttcgaggagatatgtataagcgtatggaattttgaccggaacaccctcgaagagactgtcgcgcagcgggaagatgtcgctctcctatattacccgttagcgagactagacagacagcactaccagacaacttacctcatagtgatgtttatccttgcacattagcgcttccggatggccattcagccgcttagcctcatccttgcggacagcagtgatatcgatgaaaagaccagacgacatgtcaatccagcgggcatcaatcttattcaaagtgtctctctcggatttgacgacataatgaggattgatctcgagcatgtacgtacggccgccgtcgacgttaggaagatcgaaatgatgctctgtcatgttatagtaatccgccaagaaatgaatcgtcgcctccgagatctgcacatctagatcgtcgtcccatggaaacacctatacaactggttagggagtcaccttataattcgggatatccataatcccaccttctggttccaccaccaggccaagagagtcccatgcatgatccatgtctctgcaccgattgcgttcattgttgtgaaatatgtttggattagatccgagagatatgggatgacttttgtatctgggagactgccattggcgtatctgaaaagcgttaggcatcgcggttgggattgaaggatgagcgagcgtaccggccgtcataatgatgattgaatctgagtactgcggtttagttttgatcatatctggtacaattcccaggaagggagatgttcgacatactctgattcatctgtagggttcacgcgagtcagtaaagattcaaatcagagttccatggttcgtggccttataaaccaagcttggggttgtacacatcgacgaaaggattaaggattgcacttacgaaagtacttttctttcggtatcgcacgttcactcttatactcctttgttacattctttcgcacgctcatgaaattcggttctgtatctccgcagactccagaaatggtagtcgccaaaaggaatccatggagccacaagactctggtgactgcagagcgcattccgtactggagtttcatagaccccgacacttcatgctccggatctcaatatgtacaatgagcctagagattgtgcgacgacaggttcgacctgtgctgtccacagggagtctcttccaaaatgggtgacgtccgaggatcggagacgggataatttatggagaacaaagataacaaatagaaaagagggtataatagtgtatgaagattgaagaactggagaagggactggagaatcaaaaacgcaggagatattttgactagtagccagttaatcccatttcagcttgaatttccgccggtttttccggaacccccttatccaagagctgacgactcccatagaggaacaacccaagcgacatatccacggatcgaatcagcagagtctgcaattttgcgccacggacgtgccccacatggcaataagcttgtcttgagggtcgcgtgggcaatcttggcaaggttttgcgtgtgaaacacgaatttcaacccgatgtttcccatgggtgacgaggacgcgcatcccgctaacgctatgtccattggcgttccccaaaagaggtagcttggctgctagtagcataaagtggcgcccagaaactgattggggcatacgcgtcctcccctatcgcatcattttagtctagtggctgcccggtccgcacacttagagacgggttgagaattggtggatataaggttggacatgtatcgctctcgaataagaaatcaccttcatcggttacttcggctgagattcggttagaggtgcatctcaaagatacaggctctgccaagggcttcgggtaactcgatccgatcgaagccccactcgtccccagcaatgatctctgatgttgctgttatgggctgcagcaacgcaaaaggacccaagatctgaattgcgtaaatagaggataaagagcagatcctccccagactcgactgatcaacggcagtgagcgatcgtggctcatttcgaaacgtcattgaagctgaccaatcatgaaagaatgcccgatggcgcatgaagatagccattgtgcataacactgattgcagaaatctccgaccccgagcctcaactccgagcggtggatctttcagcttgagtccatagcagaaagatattaaaaagcgactttgcccaagctggaaagttgctctttcgattttcttcaagttctagtcttgcttcctgatgtcgactatgagtggaccgggtttattttccagccgagccaccatgcgaccgggaaggatttgaaccggtcctttccacgaaggagatcatatctgctggtacggagtagtggagtgcgagctgaatggctcgaagtaatgggagtgtctagggcataccgcgtacctccaatcgtcacttggattgaccttgaaagtggtggaagatgcgagctggccacaaagcagggcctaaagatgttcggtgtccgtctattccgcaaaccacggacatcgccgttagacaatctcacgcgctaaaatgcttgtcaagacggcataatcggacctgagagatcaacaaacagaataaccgcataaatttcctcaatgaaccagcgttgatatacttaccttcaactcaccctataaattagcgcgtgtcgaacaacacctacctcttttactcggatgttccatagggcacacttgtgcacacttgtccggcataccgagaaaatcaggtttcaacggagatgagccgagtcttcttatcacatgcttatagttgtcctctaccaccgacgccgccaacgccggtagctcatccacttggtttgtggcagtgtcgagtggcctcattgtggggtggacaacaactgagacatgcatgcagatatacagatgcatatggttgaatggctatttcatactccgtactcttcgcgaataggatctatatcccgatgatactataacaccctgttcggcgtacggagtacatagccacacgttatttcacaggttcggccggggtattcgggccggacatacatacatgttatgtcccatgttatgtcccaaggtttgaattcatatttatttccctcatccccacaaatatgaagctatggcgagagtaaaagatgcatgaaccgattagggcaaccaggcactttcgattggccaataatggacttccgattttcggtggaggtgtacagaggagcgagtggaataatgattcgctatgtttagctttagcctttcaatctccattcacggtttcgtttacaagtcgagttaactagtactacggagtatgttgtacactgaactcagccaccgtaaaagaatgtagatcacacatacacggattttaggccgagcgagatggatttccctttccgttttagtgctcaccccttgccgctttttgctcattgagtaaagctgagcacgcccctgagtattacgtaatcgttaaacccgctcactgagcatcacatgattattacataagctacaaagtacattttcattaaagcattgaaactaacttatgaagataggagtgcctcgttgtgaggtaacagggaagggaatgtggacctgcggataccctttgctttttgctttaatcgggagttggggaaacaagcagaaccatctgatatgggttggcacgtgaggaagttcacgatggctattgaaggaagaaagaaaaaaaaaagtattttagtctttctgctggacggaaggaggttggtagtatcatcgtcgtgggcattggccccgacagatttcggtctgtcaactagcaacgttactttgtacatccccgagaatgaagacatcagaagcattaatcaagcatgtgcatcattataaactcatcccggtaaaagtattcatagaacatggagcgtgattggcgttgtcataatattcattatacccttacattgctttatgcgggttactcacatatcagtccatcactcgtcttctctggctagcaaatgaggcggtgaatagaattacccttaggaatcctccaacttggaccagaagggtagtctatcttggtccctatattataggtattcccagttagaaacttttctactaatctcagaatacccaaaaggctagttctaccaggcctatctagcgtcgacttatgcctccacctggaaggcaaatgcacagtggggccacattattggctttactattctgcgcctatgccactattcaacctcgccgagctctacatagttgcggaatatatccaaccctccatttttggttctacaatatctaggaatatctcagcctagccctttcggtaatcaggttagtcagctgtgttctaggatcgtattcgatataattgagcattattttccggtgtaaggtatttacagggtttttaaatccaacctgcacagccaccgctttgagacagataagccacaatacttggaacacctgtaatttccgagttacataaaacaggtacgatcatgtaacgtaattcacatacgagccaccacatacgacccgccaccccattcaacaatctagtttttaaatacatttatcttaaccataacgccattaaattaattaaactaaattcaactatctttctggatacctgttaattttatgcccggttcttccacacccactataccttgctgcagcccgtggacgtggttctaaccctaattaagggcttccgcgcggggggtatagaggtgcttctgatgcttctactaccttagtaatcaattaagaagcttcttgaactgagaggccttcttcagcgggtatctgccttctagatcaggtctatttttacttcttcttctcattttcatcctataagttgtactgtagtaggttttgcggaggatagagcaggtatttgtagaggtagaaggtataggacgaagaacattcgatatagacggtttttcttgtaatgacttttggctatcttaaggagggttgtagactaagctgtagcagcggtacgttatacggtttgacatgccccaggacggaggaggtagcgctttaccaaaaataaaaaacttgatgaaagctccgatcagaagtactactaagagctggccgaggagaagcccttgtgtaaaggacaagctaagagggtgttagcaagatcacatagtccactccacagacagagggcgtacgaggattgaggcgcgagtggcgcgggctcatctgcattatagttagcataccagttcgagcccttggagatagcatcactcactattttggagcgccattgtcagcggctgtcgacaatccttgttcacagtaccatctccaagtggagaagatgttccaactttcggatctctagggctagcttggccgaacggcatatctcttatcgctgatatgccactcttgaccgcctgcctctgaaactttaaggaagtgcccttatctatttcgggactagcgtcgcttgcatctataaaatatgatgaatgcctgccactcgtttcgttttagctcacctcttgccgatttttgatctcagagttaaattgagcccctggattgcccagccctggaggctcaagggttagttaactagttactgatgtgcgctgggatgacgtaatcttacgagttaagctgcggttggggtccccaaggtacggtacatactgaagatgggccccctgaggggcaccgacagccctgcctgcgaaacaggtgtgagagcagagtcgtcactgggagtagtagggtgctagagaggagaacaccatggggtgactactgagaagagaggtggaaaggtgtctgcgttgctatctagtcagttaggcctcgggagtgcttttatgtcacatagccgcttagtcatcctgctctggaaactcccactgcaatacgtacatatatgtacatgtatagcaaccctccaccaatcttcttctttcccttccctctccaaagcactatcatcatcattcactttccttaatcctcgccctgtcgagatcttcattgacataatgcgcaacacctggccgtcccctatggtccgcaaattcattcgcgccaacgcctcggcagacccgccaaggccgtcgttgttgccctcatctgacaagtctgccgagaattcctggcctcaagaccctatccgagacgaatattgtttcttctacgggacattaatggacccaaatatattatccaaagtcttaggatcgtcaaaaccaccacctatgatgcgccctgctaggattattggttacgaaatcaaactttggggcacataccctgctctcctcgatgataaaccacttcatccagtcgatggaatagtgtgtggcctcttatcgccgacgcaacttgatcgacttgccgcctacgaaacggataaatatcatcttcaagcttgcttgattaacgttctgaataatgacggtagcaccgagaaaaccattgagggagtttctttcatgtggaatggtcgagaggatgagcttcgggagggtacttttgatctaaagcaatgggggaaggacagacagctacgtgaattggactaagaactacagaaatgtccaggttggttattcgatgctttaactacgtaagtactaggcttacttacacaagtaggatgtttacttaagaattgggaatttgctttaagacgttttgcttcagaaaatgttgctttgagacctggtgctaagctacatactacgtagtttctttataacaatattctttcggtcaccttcactctctttcaccttaagcatcttttgctctgacactgtcaattctcgcataggtcttggctcaatagctcctgatttcctatggaacagtgaatctaagattccacagttgacaccagatagttcaaagctggttaaaaacttctttaacccttggacatctcgagaaaaacgtgggaacgtggtgtctgacgctgaaattttgaacgaatggataaaggatgccacaaactctacccatggtaaacaggatttctcgtcgttcgaagctagtgcttgacgaaactcaattgtagtttttcctccgtaatacagattggtcaggttccaagcgaagtatcttctgccgccgtcgttcaaaagatctgcaatttcgacatgatttgtgcatcgctcgattagagccaagcaacgacggaaggtttttcctttcaggcgagaattgtcgcagtagttactcgctgcgtaacgattgtagcgtcggtggtctgggacaatggaaaggatggctggttcgaagtagaaaatatgacgggaactggatttcagggttctgagactccatggattcccctgaggtggagaaatgtggacgtgaacagcacatgttgggttcgtagagatcttgcacactaaattgagagctctaaacatgtgtcgcagctgatctctccaggggctttgcgcttggtaaaaaaggattggagtaacaagttccactggctctgatctgtgttagtgttttgaaagtatgcatgggaattaagacctacattgctcagaattgccgattattgtcacatcatcagtcaaagaccactcagtggagtcttctagcccatcatataagccgtcaatgtcgttgtggattcgaggatgcggtttccttgcggcatggaaatgttgaacgagatagtcggcaaatgactccaggtctgtgaattcagacttcgctttggtacgatgttggagaagtagctcgagttcaattccgatccgcatcccagcctccatgtttggcgtggaaggtgtgagggtaggctttgattcgtgtctgctgtttgtagatagataaaaactccagtgacagatgagtgactttggtgatgcatgtggctcaaaggaagagtgaaagcagaaggaatagggagatatagggcagagtagagccagcattcgtgcaccttcctgatttatcacactcaacagacagcccgctctaccttcctgccaaacatgtgcatgaaaagcctcaagtgcctaatgatctttttatagctttggtacattcttatagcccaggtccagccaaccttgaatcgtccgactcaattcatcgatttcggcttcggtcacggtagtacatccttttggtcttgggtattcttttatctttctctcggatggaatctttatctgtatgagtgctaaaatcatagctgctctcttatagatgtttgtaacccttctctttggcaatcttatcttgttaagtaaagaagttttttctacctatagctaaatagattctaacagaaatccgtctgtattgatgtgtatggtacaactggacgatgttgagaactctaacgccgaaacgtcaaaagaaaggacggaaatcccgtcctccatcaaccccaacaaacaaatccacaacccgattgtaccgcagtcggtccccacattacagcgagcttcaccacccgaggcaagtcgctacgtttgaataatagtatcattgtcgctaattagactagggccaagcgaattatactctatcggggcttataagtgacgactcggtcgcaataatgcgacaagcattatcaccagacccggttgtatttaacgacagccaccaagcatgggcaaatagtgagggaacgacccttctagaaacactcaagactctgtcacaggcagtcaaagatctccagaaaagggccgatacccaggggcaggatatccaagacacaaataagagccttaaggacacacaaaaacaacccgaggatacacaaaagaccctcgaagaggcacaaaataccctcgagaatacacaaatagacctcgaagaggcacaaaaaggcctcatcaaatatgagcggacgtttgacgcacatacaattgagtacaattgaggtgcaatcaacaaaaaggacggtcagtgcttaaaggtttttaattgctgggcgctagcatgcacagaatagatggctgatgaatgatccacctatcacgtgatttgatctgatcttttcatgcctttattttcaggccgtcaagatgagcatgtctgtgcgctgactgagcaaacccgagcactcactgagcactcgctgagcgtaccctgagcactcactgagcaatatttgggaagtactaaacaattttttttacattactaagcataccctaagtgctcacagtgatcacctgtactgtgaaatactcagtgagcaggaacctgagcgcccttataaaagcggcggcaccccgatcgggaaattcgcgaccgtggcctaaaatccggtacatacaggtaaatatggcggagtacggggttttcccgatggggtgccgctgctttattagggtcctcaggtccaattcaccgattattaccggtacaccgcacaacggaggcaaacgaaagatatagaaatcatgtatctttgtaaatttgcatggctaatacatataagatataaccataacatattttctcaactttcgaaccatggagtaataatacgtacagtataagtctaggttgaattaacactaggattaatcatggctgcacgattcagctaccaagataggaaataatgatgctcaaaatgcctcacaaatcaataagcccagaaacttgttatctacgagtttgtcaaaaccattcaattagggttgagatattccgccacgatttcaatggtgggccggaatcgtaatcccgataaacgtccatggaggccttcgagagtcaataatatacgagacgtgctcagttttactctggcgaccaaaaagcggcaaggacagccctaaaggagaagggacagccatctatacctgtatggatgtaagattaccggaatataccacctgggatgtattttatcttctatcccaacctgaactgggctgaacctgacgcttagcgtggagaaggggatttttaccctctccacttctccagggcttctagcctttccctgagcgcttgagcatctttttgctttaagcttcgatttattttctagctttcacatgataatttcttgaatctcttattcacatccttgtggggtctgacatcgaaatctatcggatacttttctgtcagttcgactttcatgtcagtccccattgcacgaacttcactcgatacaatgcctcgatatacacagtaaacagcattattcggacgtaccattgacgccggctcataatttatgggaaagaaccaaactctcggcgcgcgcgcctgtgtgaatatgtcagagacctcctccacatcccaaggcgaatcaagcaccctccaaggatcagccgcccagccgttaaatagatcctgcgagtcttgccggagtctcaaggtccgctgcctccccagcccaaccacgtctaaccaatgccagcgatgcgccaagggcaagcgatcctgcgtcttcgtggcgccgcagagacggcggccccggaagcggacggattcgcgcgttgcacagctcgagaaggagatgcggatgatgcgttcgctgttgaaaaatcgcatccccgaggaagaggaaccggattccagtgacgacagcgacggggacgatgttcaggatgaatcggccgatacggacgctaagagcactctcgcattgcgggacaattcgactcactcgtccgaggatgtccgttatatggattgttcccctgaattgctaaataccccgcactccggcgtgcatggtagtggcggcttttcagcgcccccgattttcacggatatgccggctcgccatgaatcgctgcaggagaggcttcctccggcggacgacgtgatcgatcggggaattctctccctcgaagatgcggagcaattggtggcgtatttcattcacgaacttgcatttttctttccattggtcgtcttgccttcgaacaccacggcagctcaactgcgacaaacaaagccagtcctctttctctccgtgattgctgcgacatccatatccgtcgacgcaggattggcaaccgtgttgaaccgtgagatggttcgcctctattctgagaggttcttcatcgagggcgaaaaatcacttgagctagtgcaagcgctgctgctgatgatcatacattatttcccgcccgcctcgcctttgaagctgcagatttatcagtacacgcacatcgcctcgacgatggcgttagaaattgggttagctaataaacgtcgtgtctcgaaaaagtccgatcgcaaaagcagcaagcatgacgagctgctagctgagcaggcgaggacagttctcggctgctaccatctcggttcaagcgttgcgatgaaaacccgtcgcccaaatatgctccagttcaacgactggatgacagagtctctcaaacacctagaaaactcgccgcatcgaacagatcaacatgtagcgacatggttcgagctccaacgaataaccgacgaagcaatgtcctcattcggtctagacgacaccagtaccacatcacccttaaccgagtcgcgggtccaagccgtgctacgctggttcgacaagcggctcgagacgtggaagaagaacattccaccagatatgctgaccggtaagaaaccccagtcctctcgctgtgtcatgatgcatccaaaatcaatgctaacgaatcccatcaaaccagtccccatgatcctcgaataccgctacacagcactagcaatgtacgaactgggcgtaggagaaggctaccgcgacccagacgccataaagcgacgatatttcacgctgccgaccctcgatggagagaacaacagtggcagcgaagcaccggacgccccactcagcgcaatccgcatcgacatcaaggtgaaatggatgaacgccgcacatgagttgctggacgccgtgctggtttgcagcacggacactttgcgtaaactcccgaatctcacatacactcggttcgcgatggccgtgacatccctgctgaaaatacacttctccgtgcgaaccggtgctctcggggaagtcgtcacggcacaggccgtgaatgtggctttctatctcgatgccttagccagaaagctaagcgaggccagtgccgggggcaaataccttatccccagtcggtggtatcatgtcgtgggtgttaagggccaggattggtatgaccggctggagaggcgccaaaatggagggatagtagctggttctcaagtcgtatcggaaagcccgccgatcggcaccacaaaatcgatcccagcatcacaccctacccaaaaccaaaaccaagtgcaagtgcaagacacacatatggatcaggtcccagcaacgatggactccttccccggcgtccccatgcccccaatgccgccggcgatagacggatacgtagcgatgggcggtgcgggcatgtgggccatggacggcgggaataacccgaatttctacgccatgagcgcggcgggctatcagccctcggtgacgcatgcgcaggcgatgttgccacctcagtttgcctacgagccgcagaggatgccggttagtgctgctgggcagcatatggctagggcgggcatggagttggatgggtggcttcctgatgggagtatctttgggatgcagcctttgcctgaattttgagatggagataagagcctgggattaataaatcccggggtggatgcacatgaaagtgagtctacaacatatataatgtcatatatcataggtatgaactgtatatacatatcagcttgttaatattttaaccccgatatcccgtagtcatatcagcaagggtaaagggttatgttatacttaccagcacattgagaacatcatccaagagattcccaaaaagctagagcctagctcccaataactcaaccctggtagatgggagtatcacttcaaaggcagacatacccatcaccacacacagtcaagtcaccaagacgagaagaaaagaaaaagaaaaagagaagaaaccatcaaagagcgagtaccccaacggacattaatcgcatttaaagcgaaacaaataatacattcgcaaagtgctgtcggaggctcgggaggatcggaacttccgtggaaccgtcggggttcattgacgtgttggatatgggtctgatgtgggtttattcggggtcttggctgttcctttctgcactacggggtatgttgtatgtccctatgttgcattggtagtttttgatagcattggcctgtgtcttgtactccttgtatccgaccttccagataggtcttggattaatttgtgaatgtatcgttgttattgtatttcgatgtgactatttgaaggattttaacttcgttactcgaaattgagttgtataacacattcgtggatcgggatctatggaggatccgattccatggataatcagacagtaaccacatgcaaaaatgcacaggcagatcagtaatcatagtttatgtaaataatctcaatcaaaacaggttcgtgaattcattgcgtagatagaacatggatatcaaagccaaccgaaacaaagaccaactacctgatatattcaactcctggcctggcagtacagaataaaagaaaagcgtaaaagtaaagcaacagaatcatagaattgaaaacgcttccaacgcatccataaacccagcaatagccccaatccccaccaatccccttgtagcatttcgagtcaacgccttctttcgatccttggcatcttcacgcggggatcggcgtgggtgcgtcgacggggacctttgatctgagcgagtcggcgaggatcggaagctagactcgggggacgaggaggaaagcgggtatgtggatggatggtggcggggttggagtttgttgttgttgggaatattgttgtatgcctggtttcgagtcttgggggcctcgaagtagacttggcttggcgatgtgcctctgggagaggggttggaattgggaatgctgatggctgggtttgattggttcacgtttgttgggatggatcgggggattgcagcgtagtcttggttttggtagtatttgtatggctgctgggggggacccggctgtgtgtgtgaaggtaatggtggaggtcggggtagagcatggttcgggggtgggaaactgccgcttgggtatgcggggggtctactgtcgggattgttatgactcggatatctggatgagacgctgttggaatggaaacggcggccttgcatagggttggtgctgtgtgagggtcgaagagtgtcgggtctctgctcggcttcgtcacttgagtcgatgagtctcgagtcgctgcgggggctggatcgacgcttgagatattcgtccggctctggttcgctttccacttgagcttggtagctggagtactttcggcgtagctctgctgcatgatgtcgggcctcttgtgaatgggggtctctccagtccactgttgctccttcgaggtagtaacctcggatgctgtgattatcaaagtccggctcttcggtatcatcttcttcggcatccgaagagacgtagactcgaggttgaactcggttgttggatgtattaaagcccttggcggcatggtgtagttttgaagggtcaatcgaaggcacccagagtaaaagcagccggttcaacgtgctctcagatagtcgcaccatatctttcggggatatttccatatcactcagttccacgtcactattccccaaagcgatgatgggcagtcttgttggatccgagtgtctggttgcggcagcaaatggcttcgatgtcgatgtcgtattggacgagtaattgaaactgatcctctggtttgtcgggttcttggcagcatctaaagtctcctgttccacgagatcccacaagcgatcaaggcgtttgacagaccaatatcggacgatgatcatgttctgagattcagctttctcctgagcaatggcatcgttggtagtggctgtaaaggaatcagtagcaattccgtcgtcaatactggatttcaaaacgtccccaagctctagagtctgtagcatcacaatcagactgagcttgagagtttccaactgggctagcaaataggtgacatgctgtttccggaaacaccatttgagtctatcctgcagtgggattctcataagatcattgtctctatcggttgccttcagtttgtccagcatgtgttcgatttcgatgaatatcatctggccttgtccggagatctcccatgccttctctgtcgcctcgggagaccgttccgtatcagtgccctcaatgatctgcccgacatttttgagcaccagagcgaaaagcgagattcccttggcgatactatgaatctccagtctagactgagcgagttgacaagcggcagcattgaggagcagtgagaggcgaaaacccgcaccggcaaccttgataatggaagcctgtgagcctttagagagaaggaactcattagtagaatttctcaactttcaaagggaaagacatacctggtgccatgataaagcagtgtttcagatcatatcaaagacaaagtggacttcctccaactatcataacctccaagctgttccccgccaagaactagagccgcaactgcatatcaagtgactcacgtctgacatatcaatttggaaccccggagggttctctgtctgtacgcccgcgattagtggcgtcatggtctatgatttctcgccttctcgttggtttacgaggaccggcggagttgatcttcaacccgaaatgatctagcgcatgcttttcattgttacatgaagtcccgggcaaaagtaaccggcactgcctcaaacctcgattgccttggatttgtttatcaagactgttttgcccgtatcaaaagggcagattatgccccggggatttcagatgcccctacccttgctctttacccggggtttttcccagggcgaagcatggtggcaatgacctcgtattacgagaagtgggaatcttgaatgaatggtaagctgattactccgtgaagaatttcgttatctccgagttaagggatctctcttgccttgtataacaaaatataataaaacagctacaaacacagccctggggtatatatatgtgtggagaagacatgcagctattccgaggtggatctactaacattgacctattaatgtgaaacgctcctatagaatgaagaatactccatagagaaacatcaatattcaaaacaatcaaacaagaatgtatgtttttcgaagatctactgttttcattcagacttgtttatttagcatcggacccgatgggcgcatttccgctttcggtccctccacagttccttttgcgatttgcctaatctctccccagacatccaaacctccaactctctactataactctttaagctctttaattacagacttgattcaatcctttgttgtggctgctctctgctagctaattgatctctccgccgcattctccgcccctcctttttccgccgcgtggcacaccgtcatctgcggagactattgcccaagcctgtccgatgacaatctagtggcccaccatcggacgtgggaaactcgtgataaaacaaatacgcccaaataagagccccaaagctcaacgcaacaatcgtgaggccggatgggtgagctcccgaaggtatcgcgaaggaacgagggacaactgggatccgatacaccaccttaaggcccccaagagcctccagtccatgaaaccatgaccgcagcctcgggtgtcactgtagacacctccgattatcctatattatccccgccgaacgccctccattcgtcccagcacgagccccaatcgacaaagggcggttcccccacaaatcagaatggaaaagagacagagcgctcagcgccacaaccagtagcacccaaacccgctgcaggatctgttaaacaagatcctattgcatcagatgaagtagatgattttggccttcccatccgagcacgccggcacaaccccgcacccagcgaaggagagaatgccagccaaaatatccagaatgtacctgtgagctcgacgggctacagtgacgctgtggaaaagggaaaggagccagagttatcacagggcaagctagccaattcgaataatacagaagagcgaggccagggcgcagaccataacacttcttctacactcccctcgtattcatcggcctctacagctcttgctcagcctcggacctcagcttcgaaacaaaggtcaccccaggtgtcggaatggtcgcaccagcgcctcgcccaacctgatgcacattaccccgagagcgaggagtcagagccagagcccgatgagtggaaagcgatgcctgcgcttggagagttcgactattatgacgactatgggagactcattgctcgtggcgccaaagaagaatccgacgaggctgtataccaaggattgggaggagcagggaggggctatactcgggtgcagctcgacgatgatgcccaatctgctacaagtctagatgatgatacaagctacctctttcgagaggcaggcggcaactctgctggtctagttggcgaggaactgcgagataccatcagccagctccaggccaccaaagaccttctcaacgagactcaaaagatcgcgtatgtgggcgttgtcaggttgacaatccattatatgaatcatgatctggcgtcaattgccacaaccaaatctacgcgcagaaccatgcagaaagcctcggatgccatgcgaaaatggggccaggcgatcatggggcgagtctatgctcatatggatatcaattccgctgagcagattatgattgagcagctcgcggagcatggggtggaaccagaagatctggtgcgaccactcatgcagaatgcgcgggtcaagaatcctatggcagagagtgagccgaaaacctctacatccagtcgaaaattcgattctccatctaggctctccgcagagacggactcatctgaactagatccacctccgccatacgaggtccacgagactgaggagctccctgaggtcaagacgccttctgagatgccaacctctgaacgcatagatatcgatctccgctggactgtcctctgcgacctgttccttgtgctcatcgcaaattcagcatacgacgctcggtcgcgcactcttttggaaagggtcggcgcagctttgagtgtaacatggctacagatctcacggttcgaaaagcgagtcacagactcccttgaaatgcaagaacaggaagagaaagagaattgggatgagtcagatcacatggaaaagcgtcgcaagatggccttgaagcggaaatatatgattatgggtttagcaacggtcggcggcggactcgtcatcggcctttccgctgggttgttggcacccgttatcggagctggtcttgctgctgggtttactacagtgggtatcactggaactagtgcattcctgggaggagcaggcggtacagctttgatcgcttctggtgctactataggtggaagcaccattggaatgagagcttcgcaacgacgtatgggtgcagttcaaacgttcgaatatcgacctcttcataataacaagaaggtcaacctgattgtgacggtctctggctggatgactggcaaggtcgacgatgttcgtctacctttcagtactgtcgatccgattatgggcgatatctattctgttctatgggagcctgagatgcttcgaagcatgggtgacactatcaatattctggcaacagaggtaagcttctagagatgtgcgctaattgttaatagactaaccaattccctaggcattaacacaaggtctgcaacaagtactaggcagcactgtcctgatggcgctgatggcatccttgcaactaccacttgtcctcactaaactcgcatacttgattgacaatccctggatcgtttcgttggcacgcgccaattcagccggcctcgttatggcggattccttgcgagagcggaatcttggcaaccggcctatcacattgcttggtttctcccttggtgcgcgtgtgatcttctcttgtttgaaagagctggccgaaaagggtgcccacggtctaattcagaatgtatacctatttggctcgcccgttgtggcgaacaaggacgaatacctcaaggctcggagtgtggtatctggccgatttgtgaacggctatgccacgaatgattggatcctgggctaccttttccgggcaacaagtggtggcatcatgaaagttgccggcctcgcagctgtcgaaggtataccgggcattgagaactttgatatcacctcacttgtgaatggccacatggattaccgtacggccatgcctcggattctgagggaagttggttgggaggttcttgaggatgagtttgcagaaatcgaggatccagacccagataaccacgccgaacgacagcgcgaattgattcgcgagattgatgaagctcgccgagaagcagaggcgaagccagagaagaagcgcttcggcctgttcaagcgaggcaagatggccgaaaagaagaaatgggaaacgtatgatgtcgacaaaaataccgctcctcgcgagtcaagcgatcccgaaagtagccccggcactgtcctcttcgatattgaggccattcgagccgagttgctctccgaggcgatcgaagtcaaagaattagagtcgactatgcctctgatgaagctagacctgaacgctccgtcaaaaccgtcacccgcgcagccctcttcccctatcgacaggaggcccaagacacccgaactcccagctgttactcgcacttcttcactacccccgcaagcctcggggcagtattctccttacgggcccaatgaattctctcccgcgccgatgcacgaagatatggaaatgaccttcgacacatccttctatgaatccccacgatttagaaacgacgaccttcactctcgtccggagttgagaactgcctctacaatgccgacggttggagccagtgccatcggagctatggccatggagcccaatgcctgggcggaccatgatcagggacatcgggatggcgagatctcaatgacgttcgaatagtgtcggctctgggatccttctcatcttgctttccctttctctctttatacttttctttcccggtcttaagcagtagaaacaggtcaaaggtctagatattttgtatctggtctaattactgacccttgactgtggcttgcgagttccattcgtccccatacccgaagtctgtgatacaattccatctcaaacctttcacaaccgtacgggcttcgttacattgcgctagcatgtcctcgcctggcgaagaatccgatttcaatgttttctcctgcacccctcatgttcgcaagaacacactggcatgctcttgaagacggtagtcgggaactctgttctggtcatttccgtttcgacaaagaggatcaagatgctttccatctatattatgcatgtcatctgagagtaattgtgtaaccattctgtatataactgaattagtaactgtctcacgtggaattcgagtctcgcgtttcccctcatatggcgctgagtacggcgggcgataacggcatattggacaactatgcagcggacatttgattggctcggaatattgactacttcaccgcctttctcaccgccgctctcttgatgtgccgttcgatttctggggcttttttacaacataggccagaagtcctttgagggtctctttcttatgagtttttctttccttcttgatgttaactacgggtagctggaagaatgattatcagaagctctctacggtcaatagtgaattatcacagactttgggactaagacggaacggataacggtgacaattatacatacctttcaatatataacatgcaattagggaatgtttggagtattacggagtacaataaatagacctaactagtgaactacttcatattctataaatgttgttacacgcaatggttttctgccagataaaaccccgacctacgcgatgattcaaccaatcaaatccccgttgtccgatacgccgctatcgcccaccgtggccaggtgtccgcattgtctcagtttctcgaaaccgagcgttctttgtttcgaaggcccaaaaagaaatccaacaccgaatcaacactgtacctcgaacttaaccgcagacatctttgcgaagagacttgaaatcacgcaacaacgcgccctgttccaagcccgaattccctcccccggcctgcgcaacgcgcttcacatgaacccggactagttctctttgactccaagctttcagacccccgattgatgccgacaattggcgattgaaatcttccgccaccctctatcatggccgcttgggccaaacctgattccagccatgcgtccaatcgtatgacgagggacaatcctccgcgcgagcatcttttgtctactttcaataaacccaagtctgaagacgcgattctcgacgtcgcgacaatcaatggggaggctgttcaacctgtcgagacaaagccggagattaatacagacgcggagcctttaagctccgacgaagaggacgtcggagacctcattgctggacctagcattgagaaaaagccagaggatgatacagataccgaacctctaagctccccacctcttagctccccacctctcagctctggtgaggaggaagaagcggaagacccggaagcgaacgctgctcaaccaagcatcgagaagaagttggatatcgacaccgatgccgatcctctaagctccgatgaagagcaagctagcgacagcgatgcttccccacctcgcaaagaggtaaactatacgactgcgactttggaaaagaagcttgcggaaggaaacaatagggcatacaatagcccacaaactcgcaatggatactctcgcaaaagcaattatgcgcgaaccctcagtgctatgacgggctccgatgacgaggatgatatatttttgttctcctcgcagagccacaagcggcaaagggcaacaaaatatgcctccaagccctcgacctatttcaacaggccatctttcccctcacggtccaccgagaaagaaatgacctcctcgccagtcgaagaatccccaaaagaacccgaggtgacctttataatgccaaaggacatcgaaaattcgagtttccgagaacctcgtggcgggaaagactcaaactctatatcgcacccatacacgaaggaagaatgcgaagcaatgttgcttgacgatgattcacctctctcatccccatcttcttccactttcgagcaaatgtcgcaggtcgatgaagtggcagcgaaagaagacccccaaccgacatcaccccgtctagccctgtgtccaatgtgccataaggaagtagactgggccgagctagaactgttcaaatcacagccaaagcaacgtattcgcgagcaaatgatgttctgtgaatcacacaagcttcgcagtgcgatggacttgtggcgtgagcgagggtaccctaacattgactgggatgggtttgaagagcgcgttcagggctatttccccgagctcgaaaaactacttgtccctggtgctttctcttactaccgaaatattcttggtagctctttcgcaccagggaaagcgagaaactcccgtgtgagagtgagcgataacgagagactcgagacgatgacctgcggttattatggtagtatgggtgcaaccaaaatgtatgtggtatataagcccctgcttaatcggactacgttaacatttatgtctagactagaaacaatcatccgtcgtttttctgtggttatacgtcgcttagcgacaacagatgatcttatcaagacagccggcgtggctggctacacacagtctgttcttgtgcctgagttggctgtgctaatggtcaaggatgacatgaaggtcaacgacgaagatgcccgtcggattctgagggagagtatggacattggcgacagagttaatccagacttcaatgttgtccccataccgaaagatgccgaatgattgtgggtttacttgacttcattatataccacgggttttatactgtttcatctgatttctggctgtggcttgtgatttatctctgttcgcccccattccaagggccatgcattttttttcattttgagcgattgtatataggtagccattatgataccactcatgttttgtcttccatctactggaacaccaatcgtatcaatcctcaataaagtccaattcgcgcataactagttagttagtcgttattacttagtaagaaaagagcaactcttaactagctaactatagatcgaagataaacattgtcccaaagaggcaagttgatggcgggctgatccgtgaggggtagctttgtcagccgataaggtgattgctcggttgatgacacaatgcggagaagctttccacctgggcaagattgcattctcactcttctatccttcatacaagatgagggaaaaagacatgccttattcggagaccacacctctgctggaggtcaatgtcgctcctccgcggcatagatatccccacaatgctgttcgtcaagcgtgtactatctctcttgcagccctactttctgtggcgactcttctgttcctaattcctactgccattctgcctcgagagcacggctccatctggtcctatctccctggtgctcatccaattccacatgaagcgtggccagagagcttcggtctgccttacgaccagctccagcagatcctcctcaatgtgccttccgcagataaggcccgagagtggagccaatactataccgcggggccgcacttggcagggaagaatctgtctcaggcgctctggactttggaaaaatggaaggaatttggggtggaggataccgagctcgtggcgtatgacatttacatcaactatccggtcgatcatcgcctggccctcttgaagaaatccggtgacaagaccgaagtgaccttcgaagcaacattggaggaggatgtcctcgaagaggatcctacttccggcctgccagaccgtgtcccagtgttccatggctattctgctaccggcaatgtgaccgcacagtatgtgtacgtcaactttggcacgtacagggattttgaggacctcgtcaatgcaaacgtcaccttggagggtaagattgccatcgctaaatacggtatgatattccgtggtttgaaggtaaagcgtgcacaagagcttggaatggtcggcgtagtcatctacagtgatccgcaggaagacggtgaaattaccgaggaaaacggctatgaagcctatcctaatggaccggcacggaatcccagtgctatccagagaggtagcactcaattcctcagtaaggattcttttccaaggtgctgatattgcaaagctaacttgaacaaggtatccttcccggtgaccccacaaccccgggatacgcatctaagcctggatgcgaacgacaagatccccacaactcaatcccttcaatcccatctcttcccatctcgtacaaggaaattttgccattcttgaaggcgctcaacggtcacggccccaaagcgtcggacttcaacgagttttggcagggaggcggcctcggctacaagggcgtagagtacaacatcgggccatctcccgaggatgtgctgattaacctcgacaacctccaggagtatgtgacaaccccgctgtggaatgttatcggtaccatcaagggccacatccccgatgaggttgttatcctcggtaatcaccgtgacgcgtggattgctggtggcgcaggagatcctaacagtggatccgccgcgttgaacgaagtcgttcgcagcttcggcgaggctctcaaggcaggatggaagccactgcgcactattgtctttgccagctgggacggcgaagagtatggccttctcggctcgaccgagtgggtggaagaatacctcccatggctctccgaggctaatatcgcatacctgaatgtcgatgtggctgctgcgggcactaatttcgaacctcgtgccagtcccttgctaaacaaggtcatcaacgacgtcaccgctctggtgcagtcacccaaccagaccgtgcggggccagactgtccgcgatgtctggaatggcaagatctcgacgatgggcagcggcagtgacttcactgccttccaagatttcgccggcatcgccagtctcgactttggctttggtcgtggtaaaaatgacccggtctaccactaccactcaaactacgacagcttcgcatggatggagaagtacggagacaaggacttcctctaccaccaagcttgcacaaaactctgggctctggcagcggcacaattggtggagtctccccttcttgcgctcaacgccaccgactattctcttggccttggatcttacctggaccacatcaaacctgcggcggacaatctcccggagaacactcaattcgaattcgcacctctagatagggcgattcttgagttccaggaatctgcaaaggctttcgatgcctttgctaccgacctgaagtcccagcttggtgataacgtgccttggtaccactggtggaagaaggtgagactgtggttccagattcgcgctaccaacgcgaagtacaagggcattgaacgggctttcttatatcagcctggtctagatggccgtgaatggttcaagcacgtcgtctttgcccctggaatttggactggttattcgggagccacctaccctggacttgtagagagtctcgaagctggagacgtggagaacgccgaggtatgtgtttatttgcgaccctttctgccttgggtacaattactaactgatgggtttttagaaatggagctccatcatccaggatcgaattggtgctgcgacccagttgttgctgtaaatgggtaagcagacttcttacctcggtatgatagagagttggatatacagcaccgctggccttgaggatgcacagatatatcaatataaacaagtctcccgaggaatcggggtcatgtaaacagttccgaacacataattatatagttcccagcattaaattatgcgtgcacatttaccccggacttcgtcatctgactaatcaattgcatgaccgagcttcgtctgcgttacttacatctctcctgatctcaccctctctcttttgacctacaatccttttaacaagcagaaaagaagagacaacctgccttaaaatctacaagatggtatgtccttagatatacttataccacacctccaatccatcctagtccgaccctccaaggccgaatccgaaccatcagcaccatgccaccacccatctcgtacatctttcctaaataacccaaaactaacaaacccaggcatcaccaacaagctccgccctagcgctctccctcctaaccagcgttggcgggataatcggctacacacggactggatccatcccctcaatcgccgccggtgtatccgtcggcctcgtctacctcttcgcattcctgcgtctgcgcgccggccaaacctacggcgaggaacttgggctcctggcctcggcagtgctaggcggaagctcgatcccgcgtgtgatcaagacgggtggaaagcctgttccgctcgttttgtcggtgctggctacttatgggctttttgtttttggggttgcgtttagggagaagagggcgtaggaattggaattgaaatggaaatggaatttaaaatgttaaacacagataatggagttgaatcattgtttgttccttagttatatccgtacgtcatgtcagtctttatcagctatttgcgtattggctttggttggatgctgtacgaatcgatgctactttacggagacaaggtacatcataatcgaacatgcattggtagataatgagaagcctaccggagaaacgctaaaactcacagcagccgtagatggcatcatttttgccatctcggcattcacatcaaacaaactcctccaggccagggttaaacctccagtggggggccaggagggaggatcaaagggcaggcacgtactgtacgtaggccgaacgagcggctcaagggaaccgctcagttctttcttttttttgttttcaactttttttgagttttcctttttcatctcgcagcatcgtactcaaacattaacgacgtttcctgggtttgtcgggagagagatggtgggacgggggaggactcgccaaactagggtttggaatcagggccactgatgaaaccaaagatccagccaggagaatactcatatgtaactagaagttttggtgtgtcgacttagctgggttccgtaagtccaccacttgcaaacgcagcaggaaaaaaaaaaacaaagcaggacttaatgggccgggtcgatcaccgtgtcggagtcttgaatggcgcccacgattgcgttgccggggatctcgccgaggacggtctgcgtgcttttgtctgggacgtatgcatatcgaggtagctgcgccttcttttcctcgggactaagcgtatcatcattgtaaatcattcggatcgcaggcttggccttttccttcttgggcttgctgctaccctctgtcttcgaggcggcatcatttgctgcacctgaaatctgattgtcaacagggaaggcgttctcggttggtcgggcgctggatccattagagtaaccagaaggtgcgggggtgggggggacgtgtcccatgtgcatctgttgcatttcgtgcgcgttgactgaaggcacagcaaaagcaggacgctgaggaaggctcgatgcggccggcaggcccatgaatctgttatcggatggtggaggctgttgctggtggtaagggggagccccataggagactggtggctgtgcaggaagtccgacgggaaatggcgaggggtatccggagggggtgtagggcgaggcaccggggatctggtgtccaccaactggggaatagcttgaatagacaggactgccagtctgcgagaaatgaggtgtcatggcggtgggaggaccaccataaggctgagggtaggagtattgcggagtggctgcgatctgaggcgatggtgcctagtaataattgttagctcccaatacacttcacgttgaacagaacagcagaatacgactcacgtatccactgggtgttggtgtagactgaacagcactagagggtgtcacatcaccactgctacctcccgcaagcgcctcagcacgcctagccttgtgttcagccagtcgcttcttgagctctgagacaggttcaagcttgggcctcttggccggttggccgccagaagaggcgccagtaggagggttgcctgtcgcatgctggcgatccagctcagcctgctgaaattgtgaagcgacacgctgctgatgggctttgaggacatccgcgggaataccctccatgccaaagatttcaatatcgacgcccatgcggttcggcagcgcattttggacctgagtcaattgctccttgtggacctggctcaagtgcacggatagacctagcgacacaagccatcagtatatgagatcactttatctgataaatgcaacttacctccggcagtgttcagtctgcgatggcagttgtcacacttgaaatgcttagctttctggtgagagatgagaatcttcaagtcatcgaagtcacgttcacagtagtagcaccatgggcgatcgagaagctcctcgagagagggaccgcgtctttttttgcccattgtggtgttgacgttaacagagacaagattgattcagatgatgttaacagagacaagggtgacttcaaaaaccgtaaaatatgtgtgcgattgcaaaggagggatgaggggaggtatgtgtcgcagatccggaagcttgccatgatggatgaggccctttatcacgtggctgcacgtgatcaagaagtatgaagttgtgagtgagaaaacttttgagcggtgaggacgagttgcagaagtttttgctctccgcctcttaaattcgagggaattttgagtcccgcgatctgctacaatagggttcctcgcgtttattcacttcctatcgctttgcaggtccggaagcttgccatggtgtatgatgctcgatgatgcccttcgtcacgtgcctagcacgtgatcgggaagtatgcagtttggagtagtatgaacgagttgcatgagtttttgctccccgtctcttatattaaggataattttgagtcgtacagtctgctacaatagggttcctcgtgtttcttcacatcctgtcacttcgtatatctggaaacttgccatgatagataacgtccgttgttacttggttagcacgagaccaggaagtatgaagtttggagtgagttgaaggagtttttgctttctacttctcacatttgggaaaatttctgagtcgcccagttttctatatcagtttctttgcgtttcttcactttctgctacatcgcagatccggaagcttgccatgcatgatgcatgtccttctcacgtggctaacacatgatcaggaagtatgaagtttgaagcagtgtaaaggagttgaaatggtttttttgcttctacctcttacaactgggaaacaattttaaatcactcggttttctataacaggtttccttatgtttattcactccctgttaattcaatgatggatgccgcccattatcacatgctgagcacgtgatcgggaagtatagaaaacatcggagtagtgtaaaggagttgaaggagttgaaggagttctctgcctcttatatttgagaaatttcaagttgcgcagtccgccacaactagtttcctcactctcatttagttcctgttcccctgggctactcttgcgaaatatattggagtatgtcagactgggatatggcaccttggtttttcttatggtctagcggtaaaatacgctgtatattatccaatagagtagaattcccattatactacttctgaataatgatactaaaactattatctgctacaatacagatttagcgtggtcagatgctgatttatataccgtttatccatcttgaacataatcccgaatctgatttccaagatacaatctaaatctttggaaactagtgtgtacaagttaagaattacagatggagaccgaaacttttatacaacatgagtttgaaccttagaatacatgtactggtgcccctggcacatactgccaggggcaccagtaccttcataatgtatcagatcatcccatccccagcccaccccccagggaggtccgaggccacaggaaatcaccccaccccggtttataccgcgggctcagcccagtcgcgaagagggccgtgcaccaagcagtgaatgtaaaccggggtaaagatgattccctgcgacccatcccaaaccctggggtggtccaagaagaaatgatcatttggtgttgaggcaatccccagtcctctctctctcactcgggaaaaaaagtgagatgaacatgaagtaagataagagctaaagtgagagagagaaaactgaggattgcctcgacaagagccggcctaccctcaatggcgtgggtcccgcgggttatgacccgggaggggacccatcccgtggtactggacgtacgggaatggggcgtactggggcggcataggttgccccagttgcgccattggcgcaacagacgcagcagcagcaaaagggttcactgggccggggccgtagtgaggcaccacccccataggagggagggtgggaggcatgggctgctgctgcgcctgtacgcttgccattgagggcaggccgatgggccccttgggggcgaggttgccagcaagtggtgccagcgaaggcgaccgcttgcggcggccggggccagtgggcttggggacctcgtcggcggcgccgtcgacggtccggtcctgctcgatctgggccttggatcgctttgggttgcgaatccgtccttcccggttgaaccggtcccaatgatcgagcatcgccttggtcctcttggggttcttcgaattggcgatcttctggcgcctggcctcctcgatcgcctcggcagagagagcctccttcttggccgatgtcgaggtggactcgacagggctcgcggcggccatcggttcgacggccgggaaggaggtctctgctggagggatcgatgaggaggccaggctgctagcgccacgtcgacccctgccccgagatgagatctgagttggggcaggggtgacttcgaaggtagcccgggaggaaccaaggcgaccaagcccacggccgcgtccgcggccacggccacggccagagctcttgcgagagtttgcgtcggagtgagttgcatcggtgacgacagttttgccgccgcggcctcgggcgcgccgctttgccgggtggttatcatcgtcggtttcatcaccacccgcactctcattctgagtctcttccgactcagtggttttggttggtacttcaacctcggcggccttgcgtttccgagtgactttcggcacaaggggctcacgccggggttcgtacatctgagcgtggtattcaagaccatgtttcttcatggtcgcccacccatcagggttgagatcaccattctccttgctcttcgcaatcatctttctggcttgtgcgggagttggaacaaagcctccctgcacaaacggatcctgctgtgtgcggatgggcacaagtggtgtgttgcccgggaagtagttgtgtttgtagccataaagcatggcctctttcttttcctcgaagtcaagcttgtcctcattgacgttagccagaggggctccacccttcttcttgtgaccctgcatttgatgtcgctttgtttggtatgagggttcatctcgcttgtgtcggtgtgccttgagataaaggttgtcaagggctagatattcatcttggagtgttttcaaggtgaatgcggcggtctgtgtgagtgcgtagagttcttcgggtgtgtggttttcgggattgcggagcatgctgacaagctcatctagttcctgagcctgtacttcgaggaactgacctttctcgaccttggacttcttgtatggaagcgggtgaggagctggttcaggagcgtcccgtttcctggtctttgaagggtcatggaaagcattgtcccaagtggattcacacttggcagcttcctggatgtagttgggggagaattcgtcggtatcgtgaactttccagaagcgctcaaggcgctttttcacatctggacgtcgccactgtgcctcgcggaggcgatactcctcaggatatccagtacgcggattggaaagccagtccaacagatcacgtttcgtttcggggatctgactggcattgacttggattgtagttggctggatgccattgttatcgtcagtggtcaattccactgcgatctcttctccttcttcatcctgagcctcgccatcttcgggcttggtggcttggaccatgggctcgtcatgttcaatggcgtcgtcatcttggagatcgccattctcgtcgtaagtgtcatcggcgccgtcttcggcaccatcatacccagaaaatctgatggttttcgggtgaacttcgttgacatgatccttcagaacatcttctttggagatgcctgcgtcatttgggagcatcaaaagcttcccacagtagtcacacttgagccgtcgaggcacgggctctggagactgagagatttgggtggatgtagattggggacgaaagggttcagaaaattgacgacgtagcggggagtcctggctgtcaccaacatccgatgaaggattgtccacatccaaatcggcccttgggatgggggccattttggaaataaacagtggaggaaaaaaagaacaagaggggtataagtgtttcaatatccaggagaagagaagaagaaaaaaaaaacacaggtctcaaatggagaatgaagaatgtcaagaaagaatctgtatagatagtcagcgtgggttcgcctgcggtgccaagacgccagtaaatcgtagcgcaattccgcggttccaaggccgaaggcacgaggcatggaccagcgcgaacacaagaattgcaaaacattgtaaacccagtgaacgcgacatgtaacatgagaaaaagcatgaaacatcagatacggtcgggccaaaatgcatggatcaagatctgaccgggaagtacactgggaaactgtgccatacaaaaaaaaagatggaaaagacgcgacacttaccataagatgtttagaatcgagttgaatccttgtgggcaggacacacgagtcacagcgaatgactgctggctgttagtgagttatgcaaagaaggatgcagggtggacatgaatggctgccagggatggtgtacttactatccgactgaagaaggctgggtagttgacagtccacttattgagacgacgcgaagtgggatgagagaatatggaggggggatgagatttaggagacaggtgaaatagatgatatgtcagagaaaagtacgttgcaaacttgtggtgtttggcgcgcagatcttgcgtcgctgggtagtatgaagaagaaaaaatgatcttcgtcgacgcgacactgcgcaaagaagaagacacgaaaacaaagacagcaaatgaagtgagagtacagaacagaatgagcacgggaaaggaaaataaatgggaaggtgaaatgggttacagatgatgaagttgagaagagattgaggttgagagagagatagttttgtagtttcataggcagtggaaaccccgtcctggcccgaccaatcagaggcgtcgtatctactagccacattgaacgacattgaggaaaggggggtttttgatttggattgatcactattgatcgcggatttgattgattctatgcattgtattgatcttcaatggcctattgtctttattcctgcattgttacctcttgttcctattttcgtttttttcaacagacgtcacatgatgcgtactttacggtcgaacaatagcaagctcctcgatagcatgtcgcctcaatagcctcaatagctagctattgaggtcaatagtgaaaaattagagtaatgcattttgggcgacctagtggtaccgagctctatgtgctgtcttccagccgctttctgtgacggtctcgtggactcctatatccataatccaagtcacgggcaagcgataggaagaccgaaggccgaagatttggatgttattagacaggtagccgagcacggtggatacatccgtgggggactgcccttgacctccggtgcatagtctccatgccttgtgtcacaaggaacggaaaagtgacgccccatcccagttgggatatagaaacaggaatacacattgtcaactcttcctttattatgtctaccttgagtgtcgagagcacatacgacaagttctgcatatatcccgacaactgtctcctatcctatccgtacatcaaatcacaagtagaggcagcagacatgccaaacccacaattataaccgttcagctttagcctcttctagttttaatatcaaatatgttgttataacgttcgagaagaacccttgtggcaaccgcctcgtcatcagcaagaatagccgctcatgtctccttcgcctatacgacatatttcaaccctccagggcttgtcggatagtaactcagcccggatttgttcacatccataatgattatctacatactaagttggttagttggatataataacttgtcgcattcgtcgttgccattctagtgtagaattttcccaatctgttagaatctttattttcaacgtcaaacttgatgataatctctattagacacagttttttttacctaaggacactgaagagagacgaatcaaaaaaaaaaaaaacgaaagtaataaacaaagatataagaaggagaaacgacctggtgccatttccctttccggactgaaactgccgccgctttttttcatggagtagatctacctaggccctggggccccggggcagatcctatcatcctacaattcatcctcggcgccacatcacaataatattggtagaatgcatcctaaaactatctcgccatcaaaccttactattgatatttgcccatttttgagtgagtacccgtgtggccagagaaaaaaaagaagctccctctgggacgaatcaaggacttcgtcattacgagtgatgtatactccgtactaaaggagctaattttgaatatctcgagactggcattttcagtcaatatagcacggtactggagctctcctgtcaaaaatgtaccctgccatatgtatgtcaatttctcatcggggatgtgcaagaactagattcgtttctaaaatgggtacataccgatctccaccactaaagcagcagccaaaaaactctgataggcaatataccacgagtgggtccccggggtcgccccaattttccctggaatgttccttagacccgtgaaatgccgaggtctccctagaatatttctagtacatactagccctctttaggcagatttacgaattgtatagaggtctttatcctatgggaacataaaatgatctaaagcagagaaaaacatgtcaatagggactagtttagcgcttttttgttgaagtataagacatagccaaggtaggatcccaaagcactacatagcaataagtagtaagctcaataagagtatagtagtattatcagcacataggtggtacaaagtgcctagaaacatacaacatactgcagggactgtacacattctatacaaagacctatagcagtgtcgcaccaaaacagtgtctatcctaaataaaagtccaatattggttcgacctgacactattcaatcaaaagcattccttaaaacattgattgttaaggtacgtcgatgactgcaaagcagtaactatcaacaccgtgctaattatccggagagagcattaatctctggcttcaaggccatctgtgattatactagtagtcgcttagtttatctattgggtaacctcgaagaaaagctctaacatagcccggtatacgcccttgagggctagttggatggtcttagagatttttgcggaattctctgatgttgaggcttctaaaacttcagcaaccgcagccaaggttaccagctacgaatcattcgacctcggctctcctgtctacttaatcttgctatgatttttggtcctatgggaagcatgcactcggaaaaaagggttgaatcctgcgtatatgacgattattcttctataacatttttcctgttgccatttggtaaaacataatatcaattcagtaagcctagggaacccaacttagataggctcgtcgggtggccaccttgggagaatcacagaacatatacccaaaggcgaagagtcaatcctcagatcatccaagtcgaatttccatgcctttgcaacccgactatctggttgatatccggcacgagattgccattccaacgtactggcgttggagtggttgtgaagatgaagggaaaaccggcaatagcactccatacgaaacgtcatacgtttcaaacagggcatacgttgggttgcatagcccagcgatatgagaagccgatggaattgctcatcattcatcacggatgttccgttccatctccgttcggcatcgtgtatcctgtcattccagttgtcattctcgattttggctcggtactccacggtgtgattggacgtccattgtcctagttgattgccttgcttttagtggctatagatatactaatggaaaagagatattcattaccacaaggaagccaggggggtacatcctgaatttccaatgttttcaaatagggccagtgcaaggagcctataataggttggccttttccatccaaaggacacaaaaagtcaaatggaagagtggttctcgccaacttcaattcccgaaggtgaacgctgagatttcgcaaattgatggccaggctatcaatccccgaagggatgacatttagtccaggtaaactatgtttccacgggccatcctccgagccgttataatgtaacactcttaggctgtcaggaataaccccgagcaaggaagccaatgctatatagctgttaataaaaatctagatgaaaagacatcaaaaaaagtacaaggcttacacgctcgacgcctttgtatatactgtaagtaatccggacggacccattcgttgagatccagctccagttcagtgatggttggacagtgttggataatagtctgcactgttccggtccagatttgatgatgccggtttctgtcgaaattttggtttaggaaagagagcttatcaatgcactgaacgtgcgctaggtatagctcggacagattgttgataaaacgcgcccgatatggggggatcggtatatggcgtctacccctgtaatcgaaagaaagcgccgcactagcggtaggacagggcaaagtatctggttccattctaggccacctaacgtgttgagatcctcgaagccctaggtgcaacgtgagacggcaatgctggctccatgaatgaagtgtttggaaaagatcaaacatagccgtctggaaagcgaaatcattggcctgccttaattggttgtctgcgctatatttgctgttttcacttgtggtccagtcgaatattttgcaggggatgatgatatcgtactccagctttcggatccagtttcgccgtatggaacgactaccggatgtgagtttttgaaaatgcgttagagaaattccacgttgcccctcctctttatggtaactgtcactatagacagcgagatttgcatatatcaacggctcgagggctgcctgccaatagcgacacacataagcgcatggaatcaaagaagccccgtcaattcgcaaaagtgttgcgatttcaaatagcagttccaggggtagtgatgtcgccattatgctagcgagtccataacactgagtatcgaaccaggatgaccttgcaaaagaaaatagaataattagagaagaacgagaaggctaagctagaatcaaagggaaagaaggagttcttaaaagaaagataactagttagaagtagtgtactttataagtgcaggcttggcgccacgttgcttggatgtatcacattctgctgtcagtgtgatagatcgtcaggcgtattgggctagggggtcgaacggagtagaggacctcaatactgatacacatacggagtacatacttatctcctaataaaaaaatgtcaatagttctttaaaaccatttgattttgcttataacaccgacagctcagtgcaggtggttcttctcgccaacatccaaagccaccaaaaagcgactaacacaattataagccgcaatcgtagcggtgatctcaaccacctcccgttcatcaaagcacccccttagctccgcaaaaacctcatcgggcaccgtaaccgtcttagtcatggcgtcggtatactttagtacagccctctgctcagcactcaagactgacgacgcagcctcactcgagaagtccacctggatatccctaataaattgcaatgcctctgagcccaatccaccttccacaagcagaggtgcatgttgttcccattcgaacagggcgccgttgaccactgcgacgcggcagatggctagttcacgaacgacagttgtgagggtggttcgggtgcggatcgctccaataaatgagttccagccttctgtgaccgggtaggagtgtaggagggccaggtcgagggggaggagcgggttgggggctcgacgggcttgaacgctggctaggattctggcttcatccggcgtgctagttgctggagggtctgcaacgtaagggagacgcatgatgggtggtacgtaagggttgtaggtgatcttaattagaagttggtatgttcaatggctggatttgagtcgaatatggggtctagggtttgctgtcagttgagatgtgactcaatatgcagtgctttggagccaatggctgcttggatgagacgcaagtggtcagtacctgattcaaagctgtaagatactattgttgaacaaatcggaactggctctatacgggaatcagcaactatttatcggcaaccccgcgtgggtccatagcggataagtcaaagccgcgggagtcggggttgcgcttccgggttccgcaggaattggtttgatgatgttgaaattgcaggtacgcatatgtgaagagagtaagatgtgaagatgcgaagctgtgaagattgatatcctgtgctctctagggatttgtcgtgcggggtgccagatttaaattcaaggcccaggtgatccaacatcaaatatatccaaggcttatattttctctgtgaatctaagaaaatattcagattacagaattaatgctttatcttcatcttttaactgatcttcaccaagtccatccgcagtcagtgctgtcggtcttggcacatgatccacaagttcagaagctcccaaggtgtcgtcacttctcctgaacattgttccccccaaacaaacatgcctccaaaggcccctaaacctaccagtgacgagcttctggctcagtttgataacctcggtcttgacaaatccggcaataaaacagctaaacctgtcgtatccgacaatgtcaagggcgggcaggaggacatactggccgagctggaccacctagccacacagcgtccagccagcggaccaggtactccgcgcctgtctgccgataagcctaggtcatctacacgatctccccgcccgagcgcgaccatcgaccgaccgaccgaggacaaggcgccggtccgccggtctgaggagacaggccggctctcacgcacagaaaccaagccagaacagcccaaggctgagtctgagaatgtccccgcacagcaaccatccgatgagggtgccggctggtggggtggatggtcggggggactgttcgcaacggccaccgcggctatgaaacaggccgaggcggctgtcaaggagattcagaacaacgaggaggctcagaagtgggctcagcaggtcaaaggcaatgttggagctcttcgtgatcttggtatgaatccgcctactcaaagtatgctctcttacatgtagggctaactggcacacaggcggcgagcttcgagacagggcactcccgacattcaccaacctcatccacaccctcgcccctcctatttcttcccatgaacgtctacagatccacgtgactcacgatatgtctggctatccggccatcgacccgctagtctatgcggtattctcgcgagtgatggcccaagtcgagggcggggacctgttggtgatccagcggggtcaggagtcatccccgaaacgtgcgctcgatgtgaccggctacatgaccagtgctggctggaatgacgggccctggtggcggacggtcacacctggacaaccgcggaacatctcttccgttctcggcgccgtggaaggttccaagctcgctcgagccaacgccgagtcctacgctgccgagtacttctcatctcgtggcggagtcgaagaggccgcaaagcatgcttcggaagtcctgagtgaatccaacccggtccgcagcagcgacatctttttcgctatccaggctatcagccagactacttccaatgacctcttccaggctggcgcgacgggcgaaaaggttaccgaaggagccgtggaagctaatacgcaagaagaggagatttccttcgcgatgtacctccacgaccccatccatggcattgccttccacgccatctcccagagtatccctcaggcatggattgaatggctcgatgattcggttctagattccgagaagtcagacgcctatggtgcgaatattcagcgtgttgtggtgcccgaagccattgccgaggtcatcgagggtggaggtgtcgacccccgcgaatgggtttcggagtggattgaagaaactctttcgttgaccgctggtattatcgcgcagcgatacgtggcccgacgaatgggtgtcggtgagggaggtgtcggcaagggcaagatgcgagctgagcaggtgtccactgtggatagtggcgcaggagaagctgcgcgtgcgctctaggactgccgtgatcctataccgagctcaagagctaatgctcttattcccgaatctcctgttgtttatgtgatacacctgctgacttgtacctgcactagctatttctatttctatatttcagtagttaccccaggctgtctagtagggagaatgaaagcaaatgaccattatcgaaaccgcttgcaaagagaagatcatgtatgggattcccgtatatgtatacaaggatggtgtctgtctctgtgagaacgacatgatccagttggctcgatggtggttctttttggtctttttagtctttttaggtattgtttttatagaacttcttcctgatgttccattagacggcagaaaaaggcttaaattttgcagactttctatgtataaccttaaaacggaccggccttcctataaatcaccatattatgtatgcattcgaaaaccattgcgggtatcgtaggatcatctaaagcatttagaatctgttcaacaacctattcaagaatcaaggtccagcggcccttcaagaccggggatatgccagaagttggctcggagggcagtcacacttgatcacaattagcatatccagttccatccgctcattgcaaaaagaacatcttacctagtcgacccattgagcacagtatgagcatccgtgccaacctcactctcctgcaacgtcttcttcatatccgacaaatcagcagaccacttgaagtggcgctgtctggctggcgcatgagcatgtccattaacatacgtgccattcgtatggccattcatatggccattcatatgaccattcatgtagccattcgtttcgccattgacatgaacaccgttcacaccattaaccttctttttcaccccctcctcggcatacaaacagcccctgggccaataatacggcaacgtgtgtgtatacagcacaggcctctcctcaacatccagaaccatcgggacgttgatattataaagctccacgcgctcatcccagttctcaaacagatgccgcacgactctgacagccagtctcgcggccgcggcaataacatcatcaggctgcggatccttgctaccaaacgagatggcaatcccgcgcttaccacagaacaccgcttccagcgcaccgcctaccgtccccgaggacaggttgtagatggtagaggcattgcggccgtggttcgggcccgagatgacgaggtcgataggcgcgcgctcactgaacaggttgtacagacctagttgtgcgcagctggctggtgtgccgttgcggatcactacccagtcgttttcggggtctggggattcgaagctcgtgtcccagctgccgtcggcgtggaaggcgtctgggtgtacgtagcttgctgtgagggaggcttcgattaggtgggctttgccgatccaggagcgtgaggctgccgggattgctacggagacttggtggccgtttgctttgagggtgtcgactagaggtcgaagatatggtgagaggttggtgcttggtggaccatcatcattgacgacctattttaggttgttagcatttttgcattttttgaggggtttatttttttaaatatctatgtcgtgtgacgtgaactggataatagatgcaaggaatcggaatgagggagtagtagattgtcatgtgacgatggtttccggggaagtatataaagcagacccttgcaggaaatgtctttctatactctgtactccgcacacttgctagagggaaaagaaaggaaatttgccaatgatgtcacttaccaggatgtgcatgacgggcgagattgaacagcgccaaggaggttatgggtgatattcgaggttcgattcggatcggtaaaggttccccggtggcggtctgggcctttctgttctctggtttttcttttataagagaataagaagcagaagaaagaaatgttcagcaccccggaaatatccggggtgcagaacacttatacctggggaatcagggtaagaaggaatgagccattggccacaccgaattacacaccggggcattggggtgaagccgttcatgcggggacagcaatgggccgaatgcagcatgcggtgagccgattcggctttctctcggacatgctgaccatgtgttttctgtcatttgatagatggtcaagggttggcacggagtacggagtatattattgcggagcgaagcgaagcaattatgtactcgtgtaagtgacggggtcaataggataggggatgtggggtgttaatagtgttcatagtctatagttcattgtaaatgcagcttcagtcattcgccacctatattccctacatatagtctagaaatggatatccagtgtgtacaactatattgtatatccatatgcggagtaagatatatataataattagtcggcatcggtaagaacgagatgatccaattggctggtagttcttctctaatatattgtagtcttttcgatgttctttgttatcttcacttgctttttgggttttcttaaccttcgtcgttcaataataatccataacctatgggcttaaatactaataggatctatacttcttagtcgtttttttatagtcagaaggttagtgaaagtccaagtgggaagatgaggtaatcaacgctgcaggggagtgctgcaacctacacggtagaacaaggtctggatggaaattagaaatttcgatttggactttgtcgactggggactgtcgactggaagaagaactgagttacatttaatatttcgcctaatgcgcttgcttagacggagtactccgtacggagtagaacttccgggttcctggaccattcatgactcaggggcgcaccacatttcctctcataagaccagaccggagatcgacatgccggtatacaacgtagagcctgcaacacaatacattgtgataatgggcctttctatatatctatattctcatgtatttcaatttagttgggattccaagatttaaaaccaactcccatgtctatattcagcatagatcgttgtacggagtactccgtaaacaagagcgaaatcctaaagtggtctgtgccggctgcacgctaaagtcgatcgcagaaaatcttgaggtggggaaccccgtcagcccttcaacaatcctctggcccctcaactctctcctcttcaagtcattaccgatatatccattcgatagttacttggacacgttgacaaatcctcgctgaccggcataactccattctccgcccatcgaacctgcgaagtctcaagcgaagttcgttgagatctttgctcaactaggtcgtcgccgctacctcaccctctcatcctgtatggactgtagaagtaccgggaccgctgcggggatcgaccccaagattctggacaattggcaaactgaaggcaccttttctgtcgcctcatgggaacatctgggttacgaccaatcgcccgagtgggacaccagccaagactcgagccagtgcgatgcagatatcgcagacctaggcaccttccatggtccactggctggtgaattccgtcgtctggagaacaggtccggaactccctcctgaagtgagaccgcgcagcgcgatgttgatatggctgacacttgttttgttacagaaagcacgatgtgtcacccgagaacttgaactaccccgatggcctcgtcgagggcactggcagtggcacccttagccctaagaccatcccatcttccaccgacgagaattaccattcggacgaggcttggccacaatttcaactatacaacccagtcgccatgccgatggatgcacctcttctctacccctacgcgaaaggaccggaccactccaatggcgctgtcattgtcgatgatgttgaagagatgcctcacagtggttattcggatgtcccagcggagggcatcatgtcgttccagcagattccacagtcctttcctatgattcccgaggaatggtctgtgattccacatgacattcccgtcgaaaatatgcctctgccgcaagagcccatgctactctcagtggacacacaggggaacccaaaggatcactccctgcggggataccagacttctgtccgatcgctggaatcgcggtggctcaatagtctggcatcccaagtacccgcccaacagatcacctcggtctctccaactgctggcccgcgaaatgcacgaatggggcaggagttccaattcaaatctgagaactcttcagtgtcgggcgatatgtcagcaatatacgagtgctcctattccgccactagcgatgatgccgatgccccggcatttgcggagcgccagatggaagacgatgatttccagtggaagacctcatcgcatgaatctacttcaccggaggggtcgcaacctgcattcaaacccactgccttcgtggtgagtgaggcccccgcggaatctctagtttccactgttccctcaaggccaaggacttcatcaactgctggccaacgtgccaatcgaccggcaccgcttgccatgcagtcctcggctacagtcaagaagcgcaagaccaaaaaccccgcttcaatggatcacggcataacaaggccattgcaaattgtccaggaggatggccaagggggctctattgcgtctgcggactttgtctcgcctccacgcggcgctcgtcgcaagggcccattgagtatggttggacgggccaatgcaggcctgcgcaggaaaaacaaggatacttgtgtccaatgtcgactgaacaagcgcaaagtaaggatttccacgtacatttgtgtattttcataagctaacctgtttgcagtgtgacggaagcgccccctgcgatgcttgtcgccctacacttcatgagcaaccatgcgctcgtgcatgcttctccagtattgtcgagtttggaacctgcaactacatctgtatgtatcgatcaaaccctcccatgaggtattcagatttactgactttatctagctcaacgagctgtcaaccaccctacggtggatggttccaaccgagttcggatggagattccatctgaatttgacctcagtcaactcgtgtctttgctcgccgagcgccagggacggttcaacatccgtgctagccaggcctggggctctctctatgtcctcgacttgggggagacctacaagttcctgaagaccctgagtgagtacaacggcaactcgaagtccactttcctagagttcatcgaccgacgaattgtcgactcaaaggataaatccaagaattggctgtcctgcgttgccgactgcgacccaatgaatcaagcctatgtaagtgtccacttctacacgacaagaacgtaactaaccatcctcagaccctcctctcccagtggaacaacatgcctagccgcgccaaatacagcttcgtgtccctcgacccaacagccgaagagcgaacaatggacataaacaacccagaagaccaacgcgaaatcctcctcgcagcgcaactctcccgaatcttctgccgcatgctcgaagtcgagggcttccgcaagcttgagcgcgacttctacaacataaagtggaagcggatctcgcacgagacgcacgtccgcttcctgggcgaactcggccacattctgctcacgctgcggtggcgcgtgagctggtggaagcggctcggcgatggtggccataaccccgatcctacttcgcagcactacattgaccgcgtcgagctgctctgccgcatcctctacgtctactatacatgcgtgctggcgaagctgccctcctggtcagcggccgatgtccctaagggtatttggtcgacgtatgcggactcggagaatgccatctgggacgatttcccctcggactccagtgacggcggctttaacggttggatggagcgtggccaggagttgattgaacaggctggtgttccgagccgcatctcgaagttctgagactgggatggtagacattgcctgcgaatatggttcggatggtaatgtcattggcgttacaattatagatacccttttttttgctcgtttatttccttctcctcgaggtttcgttccattggatgcatcatgacttttacatgcacgctctgccttatgatttgatgatttcacacatgttctatcctattccgcttggtttccgccatttgtacttaattactatttctcgacatatatacacttcttctcatctccacttcatccatctcgcgtccatctcatactacactatgcatacatataaaccatccaaataaaaaaagacaatagaaactgggtatcgatttcatgcactcatataacgagctctagatagacgaactgcaaagatcgaatcaaacagacaaaaaaaaaacatatcatccattaattccccgcccttcaagtcgccttcttaggagcagacttcaaagtatccttgcgagccaaggtcccatccttccgagccgcattacgctccttcagcagacgatccttctttccaccagccagcagctcgagatgacctgcctttgtcgccagactgcgttctgtcattgaggagaggccggatgtgagttgctaagcagcggtgttagtggttgttcttctctggtctcgtcttcttcttcttgtctcgaagggcacagactgcaatccgggtcgaagatatggggactgggaagcgagtcggtgcgtaccttggtcagtctcttctgcttgatcaggccggctttcttgggcgcgacggagcggacgcccggtcttgttgtcttggcgggcctagagagagtgtatgttagtttgattgctccttagtggacggatgggactgtcggctgtggctttgtggttttgtgtctggcacttacttcctgcctgggcccgtgggaccggcctttttcagtgatccttgcaccatatttgtgttgggatggaaattggaatagagagaattggtgaatcggcacaatagaaagaggtaggcaaatttttgtaaagtagcactgccagcagcacaaagtgattctgggcttctgtctcttttttcgggggggttgctggagggaaaattacttatcggcttatctggatcacgtgtgttgtgggcctggggcatgtattttccgttccgaagtatatttgcctggtggatataattttggtgattatgaagaggaaagtgacgatggaaacagatggtgaataagaatgaaggtggagcaaaaaaagaagaagttaaaggcgagaacgaccggggtcgaaccggaacagttgaggtagtggaagatcttaggcacttccctcgtggtacacatgagtatgttaccactaggccacccactgttgattccttattattacctttctgtttcttttcttttagattttctacggcttcttctcctatgggcacaacatcaatatgatcaatatgattgtgtgcatataagaatcttttaatctgtttctagggcagtgtaagttacggttaatacatatgtatgataattagtgatagacctaggctagcactgcatcttctgtcgatatattatcttgataagcatgcaaattcaagtttcgaagtccagtctacttttatatgaagttgcatcacatattgtcccaatgataaacacatctcttgttatagcactcggctacccatcaattatatacttgaaccaaacctgttagtctactcaccggtaatggtagccaagaaaggcccaaagtaccaggatactttgttttcaagatacaccaatgtcccaagcccatactactctctaggatgaccgtatgcaattgagtaatgactatgatggtcaatattagtaggatgtcgtatgttcagactttactgtttttaccgtttgcaggatgttagatctcagagaggggccctatagtggtatttgctgtgtcacgttcgattttggcaatgataaaacatgtttcggtctcattgaagagtttcaagaacttggggggattttcccggcaagccgactgggaaaacgtagaagccgataactacatggtagtccaggatgccttcaagttgtattataatggtcatgtcctcaaaagtgaaacccttgggacgggtatagccccccacggaagatccgccgccaacagccgatcaaaaaacaagggaatgcactcccgaggcgaggccgattaggttgatcatgtttaacggctccgcagctcgtagctcaggtaccagacaccggggaggtaaacactgccagggaatagtcttgtgcctttcgatgtggaatgaaaccgatggaacaacatagatattttttgttcggtccatgtagagatctggaagatcttgcatatgatgaacgacggcagggaggtgctttgcggtcttggtgtattgcacttaccgccgtactaaaagctacctatcacctggaggcctgatcagatgccccccgtcaaccaacctaccatccactaactcgacttcagaaaatggaaggttcccaaaggatctcttgatttgtgggttgaaatgtgatagcttgatagatattgtacatgatgccaaaaaaaatcccgattactctcgcagcttaccgccagtaagtgcctcggcaagcttcctaacacgctcctgagagacatcccagcgaacagcctcattggaacgggtcttgttggcaagattgaacacagtcggggggttacccaggttccagatgttctcgccgggctggtggtcattgcgccacgccgggttctcgccctcggggaatacccggtcaatttcagcagtgagctgctcctcggttgtaatgaaagtgcgagcattcacatacaacgcctggaggtgctccttccgctcaatttctttctgtgcctgcttagactccaggcgtgcccgagagagggcaaggcgttcctcgcggttggggtcgggcagaactggctgtttgtggggcatcatcgcctcaatgatcgatggccgagtgagacgctcgtcctcacgctcgggttgctgaagaatgcggtcccgccgattctgactctcaagactgcggctgacaatctttgagtctgcggaccttttgcgcgagtataggtctcgcagaccgtcccgcaggttctgtctccgcagatctgccatcttgtgcttccattcttgcttctcggggttgctgctgtttgggctcactacccgttcagacttggggagttgtgtgaccgcattgagatattgtatccggggtttgtccgctcgacgggctgggaagagctcgcgaggcacgggtagagtacctctgatatgaggtttgcgggggttggtgggctgaacaattttcggcacatcgatgaagtgaggcgattctggcccaactcgaagattggaggaggaagcaaatcctcggacctgcacagtggcagtccggctattgcggaggacagacatacggcacaattgaaccctgtcactccgtggagtagtaaagctggcaggggattgttgtaaagtaaattatcaatcaagatcaatgacacggcctccagattaagccgcgacgtaacctgaggttgattaccgtataatagggaggatacgcggtcgagtaagtcggaagaaacagaagcgattttacctggtccgtgcacggtaatgtcttggcgccaaaaaaaaaactccttcgccgccttttatttttcttcctcttctctttgcactctgccactctctgtgtttggtcttgccttcgactttttttttcgtcaggcacttacttatcctctcatatttcataccacaaccgctatcatgggtacaggaaagaaggaggccgctcgtaaagtgcggcagggaaagcccgatgatggcatggccaatgtcaagaccaaaggtgaaaatttttaccggtatgtacagcctaagcaaaaatcctcattattttgtaacaaatactgacttaacacccagtgatgccaagaaggtcaagaccttgaacatgttcaagtctggcacgccgcgccgcaacgcgcagggtgatatcacagttgccgcgacttatcaatctaaagagttgccaacagcccgcatcgagccaaaccgtaaatggtttgctaactcccgtgtcatctcacaagaggctttgacctcgttccgtgatgctgttgcggagcgtgcggccgacccgtaccaagttcttctcaagaccaacaagctccccatgagcttgattcgggacaatgataaagtcaacggcttgaagcaacatcaggctaagatgaccatcgagacttctcctttcaatgatacattcggccccaaggcccagcgcaagcgcgttaagcttggtgtatcgtctctcgaagacctcgctggcgagacagccaagatgcaggacacctacattgagaagaacgacgagggaactcatgccgatggaagcgcaattgttcgcggcgacgacactgccgcggtcgaagacctgggtctactgactacctctcgtgaatctgtcttttccaagggacagagtaagcgtatttggaacgaactttacaaggtcatcgattcttctgatgtcatcatccatgtcctggattcccgtgatcccgacggtactcgttgcagaagtgttgagaaatatgttcgtgaggaggcaccccacaagcacttgatcttcgttttgaacaagtgcgatctcgtccccaccggcgttgctgtaagtctcactatttcccatttgatatcccttttgagcactcggtttttgttttcttttctgtcctgcgttttcctgttatccccctgttccatcgctaagtcaaggcttcttcctgcgacttcggtcgtgcacgacttcggttgtgcttgtttcaatggaattccgtctgttacagctttggtatattaacactggcccgcaccgaatttcgttatgaacctaggttgacttgctttcgtcttgaaggcctgtcgcaaagggccagctgtgttttgtttttgagtagaggtctgcttctgcctatttggtggcgttgtagcagacttcttagtaacatcccacacattctatctttacacaatgtttcattcattgctagtgactgattgctaactttgcatctttgactaggccgcttgggttcgtcatctttccaaggactacccctgtctcgctttccatgccaatatcaacaactctttcggcaagggctctttgatctcactgcttcgccagttctcatcccttcattccgaccgcaagcaggtgtctgttggcttgatcggctaccctaacacgggcaagtcttccatcatcaacacactccgaaacaagaaggtgtgcacagtcgcccccattccgggtgaaaccaaggtctggcagtatattaccttgatgaagagaatatatctcattgattgccccggtgtggtcccacccaacgtcaacgataccgaggaggacatccttctccgtggagtctgcagagtggagaacgttcacaacccagagcaatacattccggccgtgcttcgccgtgtcctgccccgtcaccttgagcgcacctacggtatcaagtaccaggagaactacctcgattggctcgcgcttcttgctcgccagggcggtcgtctcctcaagggaggtgaggccgatctggatggtgttgctaagatggtgatcaacgatttccttcgtggaaagattccctggtacacgcccccacccaagggtaccgggaagggcgagaaggacgagaaggacgaggagactgtcgagggtatcgagggccgtgagggtcgactcggcgagatgccccgcaagcgcaagttggatgagaacaacgagcctgccgccaaggctacggaggccgattccgagtctgagcctgctcaggatgaagccgttgatgctgaggacagcgataatgattcgatcgccaacttggaggtcagcgatgtggagagtggcgaggaggagtgattgctccattggtgttcttcaaggcactcgagtgtcatccccattccgccctacgaaaaacagacagtatgccgccatgagatcggttatgctagctcttgaaacaacagagcttcaagccgagtcattcttcctcatgtccgcattgagcggacctggctctccacaaggcatccggcatgtgcttttatcgcacacaagtctgaagaatgccttgcgatatgtcgtgcaggcctgcaaagcgcctgtcatctaaaagccacgttatcaaccgtgagcatcccagtacataatttgtacaaccctaggagttctggcgttttcagtcaccagctccaactcagatacccgattcgatgaggaatcaaaatgaatgaaaataattcttatttaaaccctttcccgttgttttaattagtatcttagtacgcgttgctctatgatccggtattacacctgctgccgagcaacccgtggatcgtaaggttcggattagttgggttgtggttccacccttcaaccacgggttgaatccggggagagaattgtggcagaaaatagtgacattcttggtcaaatccatcttaactaggcaactcgtaataaaagtgcactgagttcctcttcatcctttcatttgacccttccaaggtgctggacgagctaaaatgggtcgaagaccttggtagtttcgacgatgggtcggcaccatcctcaaaagatcaagcacattaagcccactacctggatctttgatggatggatcagctccagcacgcaggaggacatccgcaacctcaaagttaaagcgaaggctggcaatccacaccgctgtggctccagtacggccaccaggggcattgatatcgacgtctggttcggaagcaaggatatactcgacgactggaaccatcccaaacgaggcggcgtagtatagaggatgcgttccatcaatggctatagcatcagtcgtgtttgaagcagcggttgttcgtaacaggacctgtatccatgtgccataatttccgcggccaggaagagacctcgtagcaaagaatttatggatcatatcttgtttgcgctccccaaaaccgcaggcggcaccatgttgtggccagaagtttgcggcgcaagtcatgaaagcatgatcttgtcgtactttggctgggttttcggggtatttcaagtatccctgtgcaaagttgtcgagacataggtacgtgagacacctgtgcatggctttcaggtctgcagttgcagcatctagggcgaaatattggactcgagatgagcggatccaatcagatgttagaaaatctttgacagacgcatgcgcgagattcagataaccattttggtcttcagtgatgagtccttgacaaatgtcaagaataatatggggcgggacaagcatcatatcctcatcgagtgtcatgcatgtctcatccgtgaccacaacttcgttgagactcctcaaagtaagaggctgtttggtgaagctgagccaaaagagggcctcacgagcaatcttccagtcgtcaggggcaattcgttctaacatacttgcatatgtctcgcgtaaagtccctgggaggttctgtaaggcctgtcgcattgcccttacagatcgctgcgcgctcaggttgtccaatgagagctggacccagcggaatctatgaataaataattagatcacagaaagcatagtcagatcggtactgtactgacgatccatcggcatttccaagaagagtggattcaatttccgctcggaattctggtgccaaattgctcaatgtactatcagtctgaagtcggtatttgataaaggtgtcaatgtcccctcgtgactttccgcttatgttcaagacagatgcattggggtgtctgatggagcccatagtgcttgtggtagttataagcacgcggatgttcgtggataaactggcaagcctgagaagggaggcttcaagaagctgcatatcatggctttcattgattgcatcaaccagaaggacaatcttggtcgttccggaagcatatttgaggatggcagcttcgagaacagacaattcgatagggaacctatgcgcctgattcttcgggcctttgttatagatagaccgaatatcacccaaaattgaaggagctgtgcccgagagctgtgccacaagtgatcctaggacgttccttgcattctgagaggcaaaatcactgattgtacaataaaaataagcaaggcacatggattgaccttgagaagccatataagtgagttcatttgcaacttgtgcactagcgaaagtcagatataagatgcaactgaattgccaaatggaacttacaagagcgtagtctttccagttccagctttacaactatgtcagtggaatgtcttagaggttgcgatgggtacatacattttcccaggaggaagaaagatcgattttcttcttggttgagaaacatcttcaaataaccgtcaacgaaccatctaccagtcccatttctatgtctttttgatgcccgcagatgagagctttcagggttcacaggagcgatccattgtagaagctctctgttcaaaaattggttccgctcttgagctcgaatgtgcaagtcttcttttagtgtgtttgtcagatcacgaatctcatgctgcatctcccgatccaccgaattatggtccgccatgagaaccagtatcaaccacgatttgactctttccagacgggccagatggtcgatgacttgcgtctgagtaaatggccatttcagagcttgcttgaggcgcttgaactttgtctcggacgtctccaagtccacgagcaaggattgaaggaactcgtttgttgtgtgcaatactctcgccatgacgtcgcggtcaaataggcttgtttccgattcctcccatttggcgatatcagtagaatgtgctgccaggtgctctaagatcccctttagagcgaagagctcttcgctgagttttcgcacttcggactttgcggtctgcaccgctttgccatacctgatcaggctcgacagcacatggctgacctctattacgagaccggtgatagagatcgggtccattgggattcaaatcaggctaaaactggggttctgttcaaggtggttatcaggctgacaatagctgtgtgcgttgtgtaagctgcacccccacctgggtacctgggcactcatagatcagcctcatttcgctgtttcagacttcgtaaagatgcccgaattgggtctcaattcggctgaaacatcgagtctccctgggctaaggtataattaaactctaactctcctcatttcctataaagagtaccaaccaggcatataaggaaggtcaggagagatattgattcaaaagtgtcactatccacaaccgtaccttcaccgcccccaggtctacatcgtcatcaccggcagcttgcacccttattccctcacgtcaatgttaaaatgcccgccgacatgtctatgattccctataacggaggaaaccttgatgttgttttgtaagtgatcctcaaatatgtgctactggttatctaattgtaaaaggcggcacaatgactcggtggttgtctttgaccatgattctcagcagctcgttctccgcaatacgtcagatgaagacattgaccatttggagctagccaactgcccattctgccatcgctcaatgcgcgagaatagcagagaacgacattgtggggatactgagcccgaaggcgaatttattaatccaaactactttcacatgctcaacaatagcctccccagctctgcaacatcctcgactcctccttctccacgccatcgccttgttcagcctgcgctgccccgtcggcctattaataacgcgtccgtccaacctacatcatctccacaaccaccgccacagccctcaccacagggaatttcctctgcagcattcagtccagattacttcaagaggttctttgtggaggaacgagtgttaggcaaaggtggaaaaggagtggtgctgctagtgaagcatgtcctggatagtgtgtctcttggtcattatgcctgcaagcgcgtgcccgtcggcgacgatcatgagtggctagaaaaggttctgggtgaagtgcagctgttgcagcatctctcacaccagaatcttgtctcgtaccgtcatgtctggctggagaatgcaaagataagcaccttcggtccgagtgtgccttgcgcatttattctacagcaatactgcaatgccggggatttgcatgattacatctgtggctctgttcaaacctccaccactgcgcagcaattaaaggaccgccttcgccgtaaatctaaaggcgaaccggaccctcgaagcaaactcggaggggctcgtacacttcaactagacgagatatattccttcttccgtgatatcacctctggactccggtatcttcacgctaatggatacatccatcgtgacctaaaaccaaacaactgcctgctgcacgagaccggtgatggcatcagagttttagtcagtgatttcggtgaggtgcagtctcaaaatgcaatgcgcatgtctactggtgcaactggtactctttcatactgtgcacccgaagttcttcgtcaagaatatcctggcggaccattcggcaattttacgttcaagtccgatattttttccctcggaatgatactttactttctatgtttcgcggctcttccatacgcgaatgccgacctcattaacgaagaaaaagaggacttggatcagcttcgtgcagagatcaccagctgggctggatttgaccacgcacgcgccatccgctccgatctccccgaaaagctgtataagttcctagagcgcttgctctcggttgatcccagtcgacggccctcagctgacgaggtgttaaatggaatccaagtcggcgcaaattcaaatgagaacttccgcttcagaaaagccagctcgggaagctccgacctgcctggggcggctcgggtccgcccattggatagccagcagccatctgtagagcgagcactttctcccaccaaaagtttgcaccgaaacccagcatctttccggggtgactcgatgtctgactctagtcattttcgaagcagtacggcgcctgtgtctgacaccaacgcagatggcccttctgctagcccagatcaagacatgatcatccggcatcgctactctacttcaccaacttcttctccagtccattctcctcatgaatcatcatcgcccctcgatccgcagccccagcctccgctccctcaacatcatctcctcccacctccaccgagtcgtttccccttccttaattacctgacatctttgaacccattgctatcctcgcctgtcttacaactcactctcttccttgtcaagatcatatcccttcttcatccatgttcaccgctggccgtcaacccctggatcctttaccctctccttctctctgcagcatttactttgagagcccgcagtatccaaactcagactcttgccgtctttttacacttactggtcgtcgggctgggtttccgtctaggcgccctatgtatctggcgcagaaactcggatattactttgtgagtactctaattggtatgccttgcatctattatttcctagcacttttaatgtacatctacatgacactcccccaacggtgcctctattatcgagtcgatgatgtattccatggaggcaagcagccctcaatgtattacttggtttttacacaatcagtttagtcttccatgaattgacttactagtctagggtctcagacccatcaatcatttccggcatcgactctccctgtagggcagttccgggctcagtggggaaatgtccctaaacatgcccgttgagcgagaagggatccacagcagataagcttcctcaaaacccggtgacctttaccgtgatgagcattagaagtaccgggcatcgcttgtagaatatgttggtctccgactctccggtgctcggtccattgctcgcagctaacttagttgcgacagaaactcttctactcttattgaatgtatgtgcctgtgggtttgtctgggacacattctcctctgccgacaaatgattggattgtgtcgagatgcttcaatctacccctcaaggcacgttccccacatctccactggtctgttaatttacaatacagtaacttaccagacgttgcaaatagtacagcttcagcacgataatttgaaacggtgaagccagtaataaaacatcacatgacgaatgtttattaattctactcacgtggacgggccaatcgcccgttttagcggctgcgctgacaatagcgtagactgcgatttgccggctggaagcaaattgcccaatcatttggctacagaattccacggggcgactagggactttcgagcaattagatgccggaccccgacgttgatcagcttccctatttggtatagtgttgcggccgaggttgtcaactcaggtacaactctttcatcttcatatcgacgtagatggaagaggaaactgatcgtcatggcgattgtgcaagtatatgcttgtaaccaatccttgtaacgctgacagatgctagcgcttcactctcattttaaccgatatttgatcgagtctgttctcatcccccgtggttgcttgatttgatctcattgggagacgagtacttgaaacttgccatcgggtctctcggggaaaatatgcgagctccagttctaggctggacgctcgtgtacaagcattttagatgcaggcttgatttggtcggcgtgcatagcgcccacatgggttgaagacaagcaatttccatcatggcttgtatccaaatatcaaatataaaaggcgctccgttccactgctgttgaagacttctttcttgaacaacgacaacttcttattcttccagaagaatcgagctagacaatccgccaatatgcatgccagtgctcttgttggcctcttggccctcgccgccgccgcgactgctgctccctacaaatctagtagcgctcactcgagttcttccattgcgaatctgaagtcccacgttaagaatgttgtcgttctcgttatggagaaccgctctttggacaaccttcttggtggccaaaccattgccggtctggataaccccatccacaatggtcctttctgcaacccttacaacgtgaccgatccctcccagggacaccactgctcagaggccaaggactatgactccgtgactgatgatcctagccacgctgtcactggtaacaccatggagttcttcagccagtggactcctgacaacgccgccattgccgatggcaagttggttcccaacaacaagggtttcatccacgagcagattcacaaccatggtgctaccgccaacgagactgtcaaggctgtgctggccaagcaagtcatgaactactacaccgaggcccagactcccgttctgacctcgctggttaagaacttcctgaccttcaaccactggcactctgatatcgctggtgtaagtggacactttgatatcactgtttcgagactattatactgatttcaatatagcctacctgccctaaccgattcgctgttgttgctggtacctccgctggccacggttccaacgatgccactttcggtacctatgccttcacccagcggtccatcttccagcagttgagtgagaccaatcacacctggctcaactactgggacaccgctggtggtaccggtcctgaggcccaatggttcgcctggaccaaggccaccagcaacgaggataagattgtttccatggagcagttctacaccgatgccgccaacggcgctctgcccgagttttcttacctgaacccctcctgctgcggtgttggtaccacctccatgcacgacagcggtctgatttccgatggcgaggctttcatcaagaaggtctacgaatctctccgtgccggcccccagtgggaggagactctcttcgtcctcaccttcgacgagagcggtggtttccacgaccacgttcctccccccctggccactcgcccggacaacctgacctacaccgagaaggctgccaacggcgaagagtacactcttgaattcaaccgtctgggtggtcgtatccccactctcctcatctctccctgggtcaacaagggctacgttgagcaaaagggtaccaactaccatggccagacccagtcctattcggctagttctctgctccgcactcttggttacctctggaacttcgaacctttcaccccccgtgttgaggatgctgcctcttttgagcacctgatccagagctctcctcgcaagaatgctcccaagacgctccctatcccccacgccttctcccgctagatgtgcaaatgaaagggccgcgaaaccggcggactgggtaacatagacttcatctaaactgatagtattcggaattcaatatacagatttactttatattgataagaaaccatagcatccatagctagttgaaaattatagtaggtgacagtaggacaaaagtcgagacatacgcattcactccaaattaagctatatacaggtgtgatgtcgagagagaataaataaaccacacctccatctatcatccccccagacagtcaatactcccgtagctgctctgaacctccccagaggagaagcacgagtatcatacgatttctctcctgttctggcagaattgtaggagtgcagccagagaagccctcttttcatcttggacttcagttagtgagcgataccatggtttcccatctctcgagcagataggggtatgcaccttaattttccttaagggtaaacccagaagaaattggaagcccgttggttagaggaaggaagaaggagaggaagagtgggagagggagtggattaggaagacaaacaaaacaaacaaacagtcgcatgcctgttttcaccaccacctctgttcaagctactataccaatatgagggagatatctataagagaccgttacaattattgttgataaatacatggatatataggtggattagagaagagaagcccccgacccctgcaaaactatcccattcgtgaagctttgaacttgctcacacgtttaggttgatcttcctcaggaggcaaagtatcctgttcctcgtcgtctttaggcgcgccgttgatgcgtctttgcatattgaagaactccgacgcgatctgcttctggtgaagctcctcgtcatagtgatccaattcaggagccactgcggcccctgtttttacctgtcgctcaaagaccttttcggctagagttcggtcatgtgggaattgaggcggagaaggtttctcgattacatcggagatcggtgcggagaagggtctgggctcttttggtctcgcggggaagagaacaggcggcaccgcggatggagttgtattggcttgtttgcgaaggcgggattcggtgacttgtacgggatttacggttgtagccccagtagtaacagacccattagcaggactagctggagcagcggcccgagcacttctgaaccgcgacgcctttttaggaacagtgggggtggctggagagggctccggggcccggttagtccgttcaacaatggaatcagcgagcacctgaggctcggcccgtacagcagaagttctctcggcgatggttgggggtgtgggaaccggtgcgatatcaaggtcatcagcgaatgcaacccgtttcttaggcttcttgttctctttgatggatgtttcaacctcagcaggtgtcgcgatctcgtgctgcacttcctcggggaacgtctcgatatccttgcccatgttcatcaggcctcgggcattgagcttggcctctaattccatcatctgctggtggtattctgccggaaggcgggtgtgagagcggccgtgttcgtcttcgttatcttcctcgtcgtagtcgtaatcgtattcctcatcaaaggagatgtcgcttccggactcatccatttccaactctgccacaatagcccccacctcgttgatcccataatcgagcatttcgcggcgaagtcttgcttcttccgcagattcattcacgtccgtcacaggcggctgcatgcgatcttcggcagtcacgacagactggggttgaaagaatttcaaagatgcgccgtttggctgaatgcttgtatcatcgccgcttgaggaatcgttctcatgaatttcagccttcgagctgaccggattacccaccacgctttcaagtgtagtatcgacaggagtttcagcagtcttttccggcccactcgtttccggaatatccttgacaccagccttcttcagcacatctagcaattccgaagcgtcattcccgggcgtgttgatcttgctcgagacgacgttcccatcctcatcaagctcttccataatctcctgcatcgggaactccacaccatcctgcagcagtggctggtcattcgagaccaaagcgtccagctcatattgggccttcaagagcctcttctccatagtcgcaacgttctgctgcacgtagtcgatgcgtcttccaagaagatcaaccacttgcccgcgagaccgcctcacaccttgcgaaccaagtattgtccgcatttccttctgatccaccagcgtgccgccaaattccagggccgcggcaaggaactcgtctgtaccagcatcatcttctaggttgctgatttcctcgcggagtccatcgtattccgcttcccaggttcgccagtggtaaagcgatttctgaagttggaggatgttttcttcgagcgcgaggcgctgctcctcaagagcatcgaggttagggttcagtactcccattgttgtgaaagctaaaactcagcggcagctttacaccgactatgtcaattggaacggagcaaagagaggggttgccggaggcaaaaagaaaaaaagtcgcaaaaaggtgacgagggtgtggtccgtgcgcatgggttgcttatcagcctcaacccagtcagtggtccgtctctcccacacgtcactttactttcaccatggccaccgatgcggcttctcgccgtgatgaagacggtaagatgatataaggcttcgtcgtgacggcataatgctaaccatatctttgcgcagaggtttgccctgtctgcaaatcgtcgcgatacctcaacccggacatgcgctttctcatcaacccggaatgctaccacaagatgtgcgagtcatgcgtggaccgcattttttcatccggtcccgcaaactgtccggtagccgggtgtcgcaagacgctgcgtaaaaatcggttccgcaagcagacattcgaagatatcggggtggaaagagaagtagatatccggcggcgagtcatgcacatgtacgtgtcttaccaaacaccccgacgtaccgtgtaatatgggagggctaacaattcacctcgatcagcctgaaccgtcgcgaagaagaatttgactcaaaacgcgcatatgacgacttcctcgaacaaagagaggacataatcgcgaacctagtaagccgcatcgacgtggcgaaaaccgaagcccagctccaaaaatacgcagcagataacatgcaatcaatccgcacaaaccaagccatcgaagccgaggaagcttcctcattccaagcccgcatgaccctcgaacaagaagaagcccgattgcgccggcaagcggtacgccaggaatacgagaccgagcggcgcgagattcaagccggtcgcgaggatttcctctcaagactcgcctccggctcatcgacagatgccgcggccatcgcgcgcgaaggacacaaggtgctgctcaagaagtcgtccgcgcgccgcagcgaggaggaacgcattcgacagaagcaggctgcgctgcggtcggagaccaagcgcgggtcgactctttccacagtcgatcatggtggtgcagcggatacgggtcttgtcaaaggtctgcgcaagatcaagacgcccgagccggagaagccgtacgatccctttatgggctatgtgcccgacaagcgcgattattacacgctccagtcgtattatccgtcgcagtatcttgatcctattcgaaatgatgcgcggatgctggctggtggttatgatttgcgtgaatactactcgcgcacactgcttgaggcttttgctgggttgagctgctttgttggggaggagatctctcagcgagatgctgctaatattacgaagtcgacggctacagagggtgctgctattgccgcggagaatgagaacactgcctgaatgctatttcgacttaggctttggggcttgcatgtatttgtattgttttgtgggctattgagcatagcgatggcgtttttttatttttgttcgcttggggtattacggccactgcatatctaaagaggttcaaaacaagtaaacggtctgaaaagagacctgcgctaaattgaacaagggatggaagaagttatttccaaggccgcggtacaaccgcaatgacatttaagtaccaagaactggctacttaaccaacaatcgattacccaaatcaaagaattaaacatacagatggaatcatactccatgaaacagcgccaaagaagcaaaaagtaaccagaaataatatcaacaaacgcaatgcgatgcaataatcagctcagaccacgcagagaaaggtggcctgtcatctcagtagtgctctcaatgccctcccaaggcaaatcctcttcatcatccaggtcgatctggccgtgacgagaagacttatcggtagtaccagtgacatcaggtgcatgggacataccgacgtcaattccaattgactcaagagtcgcttccatttcgtgctcggtcatctcacgaccgtcttgcttttggccctccaaaacatcgtagagagcgtagatttggtcggacttcatatcgatgtccttgaaaattttatctatcttttcttgcagggccttgcgcgggcgcttgccaagggatgcgtcaagcttgttgtaggcgctttgatatgtggctagttgcatcttcaggtgagaaagctcgtcttctaggcccttgagaacagtagcaagagcgagggcaggggcttgcgaggggcgcattgtgggatcttcgttccagacggatggcttgggcatacgctctgacacaggaatgggtttgacgatcttcacagactcgtgactgcaggtgccgtcagtggagtgacaattgcaaactgtgcagttctgtccgttgtgtcgagcaatgctatccaatgctttctgggtggcttgtggtagcttagataggtcagccgctgccaagtcgatgtgctgaagggtgatatcaggaaggatgaaagcggaggtcatgtcagtgacattacgctgcttcttgcgctgggaagttgtaggcaacgaattatctgaatggcgccgggaacgctctgcagtaggtactgtgagactactgtctccatcggcattttccttcgaggcggtggtaatatctccagtagcagaggctgggcgagggatttctgctttggactcgcgaagagatgacttgcgaggggcaggggttttcaaaatgctctgtctagtcgaattgacagtctctgtaggattggattccttaggggcactcgaacgtcgttgcttgcgcatcattctttcttcttctagtgtcttgcgtagacgagagatttcatgttcatcaataacactcaacagagtaacgtctgtttcagatgacgcccttgtctgctcggacacctcgggtccagtcacatcttcaactaccactcgcttcacgcgctgtttgctcgtattgggttgtttccgggagctctttgattcagaagagcgagacacatactttgatggcttagaagttgatgtacgccttgattgaggcacctcaatagagaagagagcctcatcggcacgttccttttcaagtcgagaaaattccctgtccacttgagtagacactttggagcgggagtcatcctggcgtctggtccttgtggtggagcggttgctttttgaggtaatgtctctggtgctccgactagcgtctccactgcgctcagtgtaaagttggctgtcgtcggcatcctcagacacggctgaactagcgtcggattcgacggtgtcctgttcacgagccttgcggcccctaagtcggctgatctgggacttgagatccgcattttcctgtcgcaattcatcattctcggccttcagctctcgagtttcgagataagcggccccaagttgtgagatagccgactctctatcatgattcaagcgcttgatggcagactcttggacctgggcctttcggtcggcaatgtccaactggttttgtaaagcgagattggctgcgtctaacttttggttctcgttttccaagcgcttggatccctttttgtgcgcattatcgtctggttcgtattttgccgatgactggcgtggtctgttcgccttcaaagaagaattttcctggcggtagctgtccaatcttctctctgcctccgacttgaacatctccagttctgcgaccttatcctgaagtagtctcagatggacaaacaaggccttctcatcttcggggacgggcactgcatccagcggcatatgctcgtgggggagagacacgtctgtatgatcatgaagtggggaaacaaatcgggtcgagcgcatcttgctctgtcgggagtaaaccggtgtgccatcttcgtacacaccggagacgagttcagagatgttagggaggtcgggaagaaggaatgattggtgggtcatggtatcaccgatagtgttggtgttggctgcattggcactgcttttgcgaggagtttccgcggcgttggaagccgatttgcgaacttccttcgcgtaggcgtcccgcgaagctcgctcgattgcgtctgcaatctcctgtgaggtgtttgcgtttccaaaacgcgtcgaacgcgccttcgtcgcaataggggctggtcgttcgtctcccaaaaatgaaccctcgtagctgtcgcgcacttttgcatgcatgtcagagaatgtcctccgctggtcacgttgagccttcgacacttgcgggctcatggtttcttgttgcgcttgcgtcgctcgtcgcacctgagcgttctttcgtaggttttcactgactgcgcgacgcgacggacgcgtggccgcaactggcttttgtggtgttgggtattcaacgcgcattgcgggcgaagatgagcgtacactattctcgaagctcatcatggagctgcgcgagtcgtcgcgcggtggtttggcagcaccgcgtcccacctcaacggacatgtccaaatcgctatgcaaaaaatcgtcgtccaactcgtgttcctcctcctcggaggtctgtatttgcgaaaattcggggaaagcacggtctagtgttgatgtgttgatattgtagtcaagctcctcgtcaacacgtcgtgttgaggtacccattatttcgtccaagtttgtgagcgaaaatgaatcgtcatgtaagccagaatttctgtgcattggaggcattctaagagtaaaagggagaagttgaagatcggaggtggtttgttttggagcaaagtcggaatgtttgggtcgggcgcgtctcggcaaccccggggattctgattggttcaaggcccccacggccgaactacagaatcgaattgttcgacttctttatttggcgttctacttggatgtagatgattgatatttactatatttgcttgaatgatactgtatgggcagtgttggggtctcttagtagatacaaactttgggtgttagatacgtatgatactccttacacttcgaaacagaccccttctatatttatgtagtctcttaatgactgtgatagctctctagatatagttctatctatcatacacagatggattgagccttcaccggcaaacagaacaaatctagtttatatcgagcacgaaaaaggtttccccatattcccatcctggaatttcctgatctgtttacctaaattagcaagatggaatggagacggatttcacggaactcaccaattcgaagatacttgcataaactccacctccgaggactgcgattccgattaggaaacagaccagattgcacacagcatgccagacatttttccggtcatgccaattcccgtctttcagaagtaaaagccacatcacaggagggaaatagaaagacatcccggagacgagcagagccgcactgatagccatgagctcggaaaagaaggggatactttcggcaactatccaagcgatcagggtgacggcaaccacgagcgccagccaggtgacccatcccttcaccgtgttgacgtattgaaccaccgaatcgcgataaatccgcgtatggatgaaccgacatacgaccgttgtattgatagagccagaaatgaagatcacggggagggcgattccaaacgcgattttggacatcacaggccccgcggacagcagagctggggattgaacatcctgtccgacaaatgcatagatgatagacccggtgagcacatagattgagatttcgatgacgccgagtgcagttatcgatttgacatagtctttcggcgtatgcatttcgttcatgaatgacggcaaagcaccagcaaaggcgtaggcaaagacgatgttgctgatagcaaccgctgctttagggaacgtgacatcctcggccggccagtaagaccagtctgaactcgctaatccaccgggcatctgagcctgttggattccagtgccgaccatggtgactccgattgccagaatgatagaaacgaagtcaacatagcctaggattgcaacatcggcgaatgttggcggtatcgccaataagagtagaatgacagcggagataccaccaaatactagagcgcaaattgtactctcagtaatatttgcaaaggcgatcatgcccgtaaggcagtgggatccaacagagagtgtcagttgaaagacgaatattacactgaacagccagtagccaaagctccccatcatcagctgcccaatgtctccatagtgggcaaccgaagggaattttatcttgactgctccgatgatgtaactggtataaatggcaacaattcccatgccaacgcatatgactataccggggatcatccctagaacggcaaatgcctgggggagactcagtgcgccgagagcgatcgcttcgacgatgctgaccacagtgagacgcttccacccgagtcgatggaagttagcatgtccctcgatcaccctttggtcctcgaacccagcatcaccgtcatttgataacaacttggtgttttcatcggcttgtggttgtgggctggcacagcccatcacgggcgaaggaccgttatcgccggggtggaaagagccgtaacccctctcgtcggccattgagaatactcaggggatgctgaagatggtatcctgaggtgtaaagtagagaaagaagagccaaatacggctacggggacatataaacacgcttatctggttttcttgctaaaaatgcaccgagcgctctcatgcggggatgtcataatcccggctggatattccgaatgttttgactcataaactcatccgttgaccactcggatggcatataattctcactataacagcatacactatttacctcaagctttgtgcaacgtactttacctgctgtttttctgctcttactcaagtaaaggcgttgattcatgactggaatgttgcttatctccgattgaagtattttccgcgcgctatgcgccataattgcttcaaagacgtctcgtgtcgtctctgctgtcgtgtcgtctctgctgtcatgtcgatcgcctgattagggctctcaaatagaaacaccgaggttcactgcacaacataatgatttcttccaaccttaaaggttgcattcaccgacagcgatagagtcggtgatagagtcggccgctcgactgttatcagacatcggcgctatcagccgacaccggccttatctggccccactaggccctaagcagtaaaacaagtttctccacattactgataagcagatagtaccatgtatgttattctagaagacatgtaagctaaggtaagctctttgatttttatattgctatcttggtactctccgtatattcgaggagcgtcagcaatggccaagttcgatttgatcatcgttaatggcaaggttgtcacggccagcgatatcaggtaaggtatcggatttagggagtactaccagaaatttaacaaggtttctagtatttgctgcattggaataaagaatggaaagatccgagctctggttgatgggttcacggacgaggagatagagggagtcaaggtgatagatgcacagtgagtaacttctacgcaaaagctgtgaggtttctaacactatgaaatcaggggtgcgtatgttatgcccggcggcatcgatgcacatgttcatctatgccaggatttgaagacaggacctcatggcctgggcggagaatgcgccgacaactttgaaaccggctctagaagtgcagtggcgggaggaaccacgactatgattacctttgcaactcaaacgcgggcagaagaagaccgcagtctgctaaatgtagtcaaggcatataattcccgggctgaagccacgggtagctatgccgactacggctttcacattatcattgttcgaaacgatgctgatgtattggagaacgagctgccagtcttgatgaaagactggggtatttctagctgcaaactattcttgacttacgagacccagaaattgacggactcgcagcttttggatgtcatgtttgctgcgaggaagaattttattaccaccgtgagtggcttatacaaatgcgcgaatgggagttttaacgtttgatagatgattcatgctgagaacggggacatgattcagtggcttacaagtaagttcatgagcttactttctcgttcgaaatttaacatcaacctagacaaactcgaaagcaagggaatggtcggtatgttttaccctgagcttgtcatttaccaaattcctctaacagcctcaagccccgtactaccacgccctatcccgtccgcccttggtcgaagcggaagccaccaatcgagctattgccctcgctcacttgatccagaacccaattctattcgtgcatgttggatccgcagtcagtttctagcggcaatgaaattatctatttgggtactgattttgatagcttggcgcggccaatgtgcgtaaggcacaaaccatggggctccccatttacgctgaaacttgcccacagtacttccacctgacctgggacgacttggtaagttctctctatatattgcgtttggaatgatcaggctaatcgctaatatagaaacgcttccattcccccacgtgctttgagaacagcaagatgatctgctcaccaccaccacctccagatatatcagaccaggaagatttattcacgtgagtatcacctacacttccagaaccaaaaagctaacaatgccagtggccttcaaaatggtactttcaccatttattcttcagatcactgtcctttccgttatgatcatccgaacggaaagccatccggcgtccttgagcatgagccgagcatggagggagagaaacactgtcacggagatgagctccagaatctcttggagcggaaagaaggtacttttcgattaatacctaatggtattcctggggtagagactcgattgccgttgttatatactggggctctggcaaccggtcggattactgctcagaagtttgttgagctcacgtcaacgaatcccgctaaattggtatggatcctcacctttatataaggatgctctagactgactcttcaagtatggtctatatcccaccaaggggaccattatgcctggatctgacgcggatttggtaattgtacggtccctccagatatgtcaagcttttcaagcctcgctaatcatgtgcaaatagtggcatcctgacaaagattttgtgcctttccgcttgactaattcgatgctacaccacaacgttgattgtaagtacctggtccctaatcttggttccgtttactaacgcatctggtcccaagatacaccttacgaaggcatggagtttgtcaattggcccaagtacactattttgcgtggcaatattgtgtgggctgatggtgaagtgcaagggaagccaggagatggcaagtatttaaagcgtggtccaagccagctgagccggtctttctccaagacgagtgcagatccacgctatgtcgcttcttggctctacgattagtccgggcctgttcaatttcatgtattgcagactgcaaagttttatgtatatattctatttgacaatccggacgaggagacaatctaaatgggtcatagggggccatgtcttatctaggcatattcaaagagtagattgaaaaaaggatagagaagagatctagaatgacctatatataaaggacgagaaagatgttcaaaggatgatgtgggcaagaaggcctagctgctttatctcttcggtctagaagtacctttgaatcaaccaagttacactctgaataaagtttgctactagtacggctcgggagataattttagaagaatcaattctaagaatcaaaggtttacggcaatgtcaattgtcaaactaatataaagtctcagatagtacacttgaatcccaaattccctgtctgtcaaacctaactaatcaaaaacagacagtctaattaaatcccaaaatgtccctgtcaaatcaaagtaatcaaaagcagacagtctacctaaataacaaaatcttcttgtctgtcatatccaactaatcaaaaatctcaggtagtatatttgaatcccacattcgccttgtccgtcatatccaaccagtcatggtcggcagccatgtggttttcaattgcctccgcacgcctcttgttgctgaaatggcagactagtccataagctgtaatagcgaacattgctacgatatagcagacaatcatggctatggttccaccggtatactccggggcttgatcggcacggaatgtttgaggtccgatgatatttccggtagcccaagcgatatagaaccaggcgtatagggtaatcctaaaatgcgttagatcagggacttatcttttgagagctgtaaggtcttacttctttgtgtggccggcaacattggcctgatagaccgaaaccagggtgatgtaaggggcccagtatgtgcttgaagagggttagcaaaatgtaacgcattcggaagtttattataacgtactataagatgctgcacagaattaaagtcagtaagagtagatagaaaaaggtcttggagggaacttactataggccaacgagctgtccggcgaggttggttcgcggtaacgcataacacaagatagcaccaagaagcggcagaagaatggagactgccacaataggcgtgcgatattttctggtggtagcggcaatataggataggccaattccagacagggtgctcatggctccaggaggcatagcaaggagtgaggtctgaagaggatcaaagccaaggccggagataatgagggtgttgaatgtggtcagcccaccattgggtacctgcaaagcaacaatggcgatccagatcaaccaagtcttgatgtcgaagatagcctcccagacctgttcaaccttgaaagtcttagactcgacaccggtgttatcggctgccttgcgctgaataacgatgtacttttcccggggggttaggaacttggcttcaagtgggttgtttggcctgtaaagttccatcagttccgctcgacattaatttggatagaatggtggcatacagcacgaagtacaccacaactgatgtaacgatggtgagcgctccgacgagaaggaagataatcttccatgtttcgaatgagccagggtaatatccaacgacccaggcgaggaagccgttgatgatcggagcgaccacgttgagaatgatactgcatcactggtcaatttatgcttctacaccataggatggtgtgctggtacctgtttctctttggttgttcttcaggccgataccacatggaaacaaccaatgtgaccgctggaattaggagtgattcgcagccacccaggagaaatctgcagacgaacaagcctccaaaactggtgcatgccgccatacacatttcgagaacgccccagcagagaacattgaaggcgaagaagggaacagcaggaaccctaagtcagtcagatattgagttcgaattaagcttctcgtgaaagtatgatagatatcttacttttgcaagcagaaggccaagggtcccatgaatgccagtccaccgaagaatggcgcagatccaacccatgaataatcatttccggtaaggttgagatctttcttgatgttataaatagcagctgccgagatagcagtcttgtcaaggcccgatagagtggcgcaaacaaatagctattctatgttagtttttgaagagattcaagaccacacagggctggggcttctcacagtcgggataagtctccaatcaattctgcgcatcagtttcttttcctcttcaacagaccaagattcaccatccatttgatcggcatagtcgctgataatttgggcggcgatgtcgacatccttgtttcttccagccttgattgctttaacggctgcgtctgctgcaacctcgccgcctttgggttcatcactgacggtaacttgatcaacagctatcgtagagttgcagtatcgttcaattgggtatttggctttgattcaatcaggtgggatcttagggttactcacagcccgaccttatatatgcaatgcccatctcgcactataatcttttggtcggaggttattcctcgggcttatcgataggcttatcggctccgatcgtcttggcttccaaggttcaacgcgcgatctcggccaaccttgggaccttcaagccatggaacgcccgaagccacctgactagtcggtgggtccccttatcaacccccgacgataacgaagtggagtggccacgtgaatgaggctgatttttagttggccgcgcgggcaaatcgatccaccgacggccaactacacgataatgtggtcaggccatccactctaaacgcggaatgcgtgggcttgggtgcacgctagctgttttaaaatactcgcgagggtatatctataaatgaagccactcatgaaatcgaacatcctcagaggttttcattgaatcatccaaaaccaaatcgttcaaaatggtatccgaaacagtcgaagagaagcggcctctttaccccgattatctccgtgagtaacatgtccaagagtaggagtctaagcaggattaacaagatccatagcattttatgaccccctcgaaaaggtcgagatggtcgggccattcgagcacgacgaccctggtcatcgagccgatccatcattcccgaatctcttgaaaaaggcgaccaatgttgtccaattgagccctcactgtggaacagagcttaagggtgtccagattgtgagaatatacgctatcattatatcgatcggccgagctaatacaatcgcgaacttagtcggagctttcaaccgagggcctagacgaactcgcgctcatggtggcagaccgaggatgtctagtattccgggaccagaccttcacggatctgggattcgaggagcagaagagaattgcctcgtgagtcaatcttaatcaagtcaggaaccctttcttacggtttacagtcactttggccctctccacaagcatggatggatgcctcatcccaaaaatggcccggaggaatttgtcattgtttatgactctaaagagtaagaatctcttttagtttatcatcttttcgcttgatctcacaactcaatagtgacctgcgcattcgcaaatcttgggctagaaaaagcccaatccagttccatgttgatcaggtaagatccacagcgtaaattcaatgattacagggactaaaagatcttttcaaacagtcccccgagactcagcctccgggtgcgacattcttctgcatgctcgagtctcctcccggcgcgggcggagatactatcatttctaacgtgagtctcatctatgaaataaaccaatcccaggaaactaacaaatatttacacagatgacacgcgcatatgaacgcctttcaccctcgttccgcaagcgtctcgagggtctcaaggcagttcacacaaccgcgaaccctatcatgcgcgagattcgcgacaacggccccgattccgtcctccgtcgaccaattactcgaaccatccacccagtcgtaatcatccaccctgtcaccaaaaagaaggcactctttgtcaactcctcctatacccaaagtattgtgggctgggacgaggaagagtcggactacatgctgaagttcttgttcgaccacatcaaccgtggacatgatttctgctgtcgtgtgcgctatgaacctggcacggtggttatttgggatcagagagtcacgcagcattcgcagactctggattatcaggcgggttctcgccgccatgctttccggttgactcctttggctaatgtgccgattccgagtttgattgaggaggatgatggggagtgtgcgaaagatgaaggccggatgatgctgaatctctgctagtttgattaatgtttgtgtacagatcgcgtgccttgttgccttgttagtcagtttacctagctagttagttgtttgtagaaatctactctcctctctctgctttaacaggttatcggccctctatatccttgtctttgtcaattccaccaactttctatcagattcaacaatctgcatactctcaagtggtggctgcatcttgtaggatacaattttgcaggctaggatttcagctcgaaggggtatgctgagacagatattaagttattaactagctagcttcctgtttgttcgtagagaatcaatgcttctcctctctgctcctttaacagttttgattataaattttatacattatgttacattgcccatcaatgtttccaccttgataaatccgagattcgttaggcccttgacacctgccgctccatttgccgaaatacgtgttgcccaacgccatctccgaatccagctttggagctcggcgtattctttttcgaatgaatactttgcaagctcgaacgtggctggaatttcagctcgattggatggtgtgacgatttgtaaaagatgcaccatgaatgaaccagcaatagcaaaattgggtcgactccctacctcattggttagggcaaagacttttgtaagggatatatggtatactcacaactatgccagaacgaattccactgagctcccgtgagcttctcgacaaattcgacaaattccttcacacataataatgctcccttgacaaccgctttagccccttcgtatgtcgcatctggctcttctttgtttcgttggattattgtcggccatcggtccaacggccgtaacaatgcgcgtaggagggcgacgtgggtaacaatgtaggagaggtagagggacccgtttccatcgaggtccccaccggaattcgctgcgttagacgttgatttcaggttacttggcaaattctcacgccaatccttgagcttcacacgcattggtcgtgcaagatccaaggaatattggagatcattagaggtctttccgatcgccttcaccgaatagaatgacctctggatatcccacagaattgttgttaatgttgaaagatgatacatgtgactctttgtgtccggcgagtcagacaaggtatcttgaatgtcttcttgctggagcagggatacatcgtaatcatcatcacctaaatgactgggcattcctcgcgcaagagcgacccatttctccatgatgtagagtccccaccagagtcgacgacgaagccttttctcccagggtggaatggacatccatgactctgggtctcggtgaagcccaatagtctgtgcaactgccagagaagttgacgaaagcgtccatgcaaacgcggtgtcggaaagatacatgttggtaggaagtcgctgttgaaggagaagacaggcttggagagtggcgagggaaggagcgtgaagttcctgcgataagcaaagccaacacagacgatacaattgctcactggatggcgggtttaacagcaatgtgtagagactgtcgtcatacataacgaacggaagggcagtggcgcatattgctgtcaataatgccaaaggcattctaactaactcgcccggcgatgatgggatctggtggctcgacaaaattggaaaataagggtcaacatatcgagaatataatttgatgagatgccacgctgcagtgggatccatcatagcccatagacgaggccacgcattgtccgtaagctgcggatctagctttggctccgccttctccagaagagaatgatctgtgatcccaaagacagtagggtgtgagagctcgaatggctttccctctttttggtgtgcattatccatgattcgatacttcaagccattcactttcggtaacgacacattctggccatcgtaggcttggtggctcaggatatgaatatcggaaacccccgtcgggccaatatagaagctaaacgcccctggaataaattcaagggaatccacctgagaaggcgaatctcggaacgccggtcgttctcgactaggtggagacatttccgggctggatgagatgctgcctcgagaaccgacccccgccgttccatatcgactgactggtgaatcacttctttgcggacttattgattctgcctgccgagtctcttctggtgtaaagccttcaacgtctttcccatcattcggtcgggtctcggtcaagagatgcagccatccgtcgggttgttcgcatgtctcgaatgtttccagttgctcgtataatctcgcccttttccgcggccccggaccctcctcaaatgtgcattcttgatctctgttggtgcatcggtgacacggcggtccatggggcatgtcgcaggccactttacgctttcgacaagcatcgcaaggccggcatttccgagatttgtacaggcgaccattcaggacaggagcagaaactgagtactccattatgaaagcaatcttagagaatatcagagaggaagaagaacctccggaacgttgagagaaacggagccttatcttcagcacagacgcgtgcttatcatggtcaagcggggacggtttccacactgcacggcagacgacttgggccactgagtattaaaccctcattggaaaatattgccaaacaaaaacttagtcatgtaccctcacataagtaagacatagttatatatatgctgtcaaaaggcggtgataagggcggtcagcggatattcactagtgagagttaagtccctgatggccggtttcgtcagctgtatgtcactaggactttggattgcggagaaattaatgttcttgtggcaagcaagggtcaccggatagcaaattggagaattaggtatcttttgtagggaaactacatgcaaaagatacataaacacaaaatagtcatacccttaatttccataaccctcgaactaattatggagaaggtggaaatacatttatagtgtatgaagtgttaattacttagtattagcatgcttgaagtaagagaatagttgaacctgtacgaagtacactatttatgaggtggtttttaaggtattccttctatattatatagaggcagatcgactggatcaggctttaatttgatctctatctttttaaatgtcatttttttgtgtgttcatgtaccttttgtatggagtttctatacaaaaaaacctaattctccaattcgccattcggtggggcctgccaacacccggtcatccatggatggccctctgggccctaagccgataccgaggcttttgtgatcgtctagtagtaaaacacggtgtcttatctcctcacagcgtggcctccagatccaatagtgcttttagatacggactcgatagaattgtatccgccactttgtcgtccatcggcaatagtggcaaccggggtttatcgccatacccaaattgtcgatgcaacaatttcttcatcccggcaatctgcgatgatgacatgagcataagaatcggaaaaactcccgggtgcttcacttactccgatcttcaatgctactccgtccgcgagagcaatcaggttttgcaactcagttgcctctttgctggacccgctgtcctgacagagatcccacagtttcacgcatgatttctggtcgcttgtcagtcgcttcttatttctttgttgtattattggggcttctcaccggtgctatattaggtaggccgctgatcgcacccgctgatccaaccgagatggatggtagcaagaagtcgataaagccatcgattgcccgaaagggggtagatgatgatcgagggaagtccttttggaaatcgaggctggagacctgggccatgattcgagtcaacttgccaacattagcgcatctgccgggctacgttagcgggaataatttatggaagatgtaaaatggtaaaaacacacgtcagtttcacaccgcagatattggcagatgacttgatgatctgcacaatcaagtcactgtccatatcaataccacccgaaacagcggggaagttgtatatgatactacaaattgttagcaacatttttgtctgaagaccggggtaatacaaacactggcaacggtgatgcctctgcgatatccacgaagaaattcttgatcgaggtggagtctgccaaaagagctccggcatagtatcctggtgggataaccatcacataatctgcgccagcatcggccgcatctttgcagagttgaatagactcgcgagtactagctccgccagcacccgcaacgatcggaacacccgtcaggttgatctcgtcaagggcaacgcgagcggaccggatgagctgcttcttctcttcgtggctctaaagataaatactctgttagcactgtagattttttttgccttaacggaagtctgttaccagatgaattgcttctcccatagacccagatatgactggaatggttccggcacttgcaatgactttcaaactggttagtgaatgttgtagttttgtggagtttcatgactatacatttcacatggctctggaaagctttggaatctggattccgaattagccaagctctcaagccagtctacctgatcagtctaaccaatttcctcatcatcaccgaagaagcacggcaaaggcgtatagattcctgtaggtaaaggccgcatcttgggtgttattgtttgtggcaaagtattaatcgagaagcagatggtcaagtgtaaagttttgttagcactcttctgcggattctcttttgatttgacttcggaatccagccgataaagatacagccaagataggacttccaaggttgggcgagatcttaggcgcggcagagctgcagggcgcgcaaccttatcgatagcgttatctccatgcccacgaggccacgggtgtatgcggggacccgtgggccgtccatggatcaccgtttcttgaagaatcgcctccaaagccggggctgtagggcgtgcagcttatcgttagcgttatctatgtacatacatagatccatagattcctgtagacacatccatgatgcttgtatgcctgtggggatctcgggaccgtcactcgtgcctccacggcctccacggttctcccgaggccctgcaggcggcgcgcattttatcgatagcgttatctatgcggggaccgtcgcccgtggatatgctctccttgtaatctgagacctcatttctgagcatatcttgccgtgatattgcctatcatgtggcatcgcttgccccaagcttttagtaacataggctgctagtgacacgcagaagggctggccgaagcggcaaaagaggatagtgaataatcacatgtttaatcttttttttttctgcccttatctctccactcacacatctttgactatctacacgcccgtttaagctgcctcgggtgaggcgcttcttggccagaatctttcgcttactacaatagtctattcagttccaaggttgtatctatagattcatccacttttctaatagcgtagagatctgcctaaaattctccaattaatcttagtccttagtatgttgtatcgaaagcatattttgtattgtataactccgatatcttctataactatcatgcaacttccaagtttgctgattgatagtgtgcttgttagttaattagaggcagttaataaccatcggggagctctactatatatgaaatcgaattaagacccctcggtggagatgggtaggtcctataggtctaacgtagaaggttgtagtcaacgaaaatgctggcgtcttactcgaggtaatttaaacagttgtgtagatatagtggaaagtagacttgaaggcttttgtatcaatatattgtattcattcgctggtctttgtttccaggatcagtctatgtaactcttgcaatttccgactatgttcatctttcagcgatggtatctcgggaacgttcaacatgaagccgaacaaaaagcaaaatacttgttcccaaatctattatctactccccctaaagtacaaatcggaacaacgggctatcttcgcccatctctcccagctgttcgggagtataggtccgctcaatttcatcaacatccaaaccatcccgtcgcttgttttccttgcgcatcaaaaaccagtgcacagtagcaggaatcatggctccgagtacagtcgcgccaacggagaatccaaatcctagaggatagacaggtgccttcgagatgttagccaaatcctggaattcgaggtttcttcggccaactgacctcgctagagatgtaaatattagatccaatactaccaccgcccacactgccgaacagcatcagaagaccgatggcagcggcccgcttggatggattggtgatgttggagcttgtccatgcgccaacctgttcaaattatcagccaagatcccaatgccgtagttagaaggatagcactgacgattggagcttgcgccgagtatccagccgcagccaagaagattgcaaagtagctcacaccgggaatggaaggatggtgcacggtaatccacaggatgataataccactagatcgttctgtttagctcgagcttccacctttttgaagatcagcttacatcaggccaagagaatatgcgcccatgatacagaagtaccgccgctgctttagatcgctgatgtacccaacagcaacacaaacacacgtggcaaaaatgtaaggaggcgtggtcataacctgggctctcactgcagtatatcccaggtttttgaccatcgtgggcagagtgtaagacagggagtatgtaggcacggagccaccccaccaaaacaacatcatcatgaagtaagttttccggtcttttgcggctgaaagcacatcactccagcggaattcataagtggaagtcaccgggccgttagcatacttgacgcgaagagaagcatattcaagttcctcgtcagtgagccatttggtacctttgccagctcgatattgatgaggaaaggcgctgttcatggtcagttagcttgtttacttaagaaagatattattcggagatctcacggcaagcaaaccagacaagcaaggccggcaaagatggtgatacacccttcaataaggaatagccacctccaagctctccaaccgtgatgtccatccaggtatccgacaccgtaggcaataacaccgccaaaggcaccggcggttgtattcgcaccgtagaaaatagccatgcgcgtaccgatctccttgggcgtgtaccacatggatagaatgaaataagctcctggataaagtccagcctcggtgattcctagcatgagacgaataacgataaagctgccataggagtgcgcttgtgaggtgagagttgtgatgagtccccatgcacatacaatgaatgggaaccatatcttaggacctactcttcgaagcatgatgtttgataccggttcgaagaggccataggtgaagaagaagtacatcaaggctagattgtactgtgtaccattcatgccgatgtcctcaaggagaccgaacagctaatcgcgagagtaattagacttaaatatgtcatggacattgaaggtaatgcatacctttgcattgcccgcattggacttgtcgagtgagcacatcaggtatagaaaactcagtgttggaagtaggcgtgcatccactgaagtcaagcaagtgagcgtctggactgtttcatcatttcaaaaagtcttacacttcctgatgagcttcttctttgcgggtccgttgaacacattgtccaggtgaagaaagcgctcgtattccagcgccgaatttccatctgtcacagtcacgacctcgcccttccgctctgtatcggtcagggaagatggcggcgaaaagtcggtcgatttctccatggtgagatgtcagagtgttgttttcgccccaatgtttgaaaaaaatatcctgatgaagagcggtcttaaaaggtattttggcatttgctggtttatctctgtctagagcttggtatctctcggattgcgagtagttggctggatttggtagcacaaagatcgcggggttcatcctatcagagctataccatttgaagcacactgtcgctatagcaaagcgaataagatttccaattgataggcctgtcgttggcctctccttggcctctccttggccgcgctgggacgataccgctgataagggcgccgtgcagctttatcgcacctcggaagcttcgccgagcggccaaccgtatcagcgtgataattagatgttggaaggcgaaatagatgcatgtaagttttttttttcaacagcaactgagggcagctatatagacccaactaagctgagctgtcaaaacaagtcgcgtaccgattgtttaaagtcaacaaagtcaacaagcacaatgtctagcaccaccgttctcacaccgggaacgatcactcgagagaagaacgaaaatggcgaccctctgtatcctgactacatgcgtaagtctatatgataacaatattgaataagcccgtggatgagtgctaaactctatttctttcacagcattctatgatcctctcgagaaggtagaagacatcggttctttcgagcactttgatcctggccatcgtgccgatcccaagtttcccaatcttctgaaaaatgccaccaagatttgggagctttcgccgcatgtgggaactgaaatccacggagtccaactctctcaacttgacagtgctggcttggatgagctagctctcctcgctgcgcagaggggtgccttggtattccgcgatcaggatttcgtgaatattggcttcgaggcgcaaaagaagattgtgagccattttggtcctctgcatattcatggctgggcgcctcatcctgctgcgggatcagaggagcatatgattatctatgaccacaaagagtaaatataacctctcagtgtgaaatgaagttcactacagctgacactacagccagtgatctccgagtccgtcaatcctgggctggtcgaagcccagtccaatggcacacagaccagagtcctgagcaacagccccctggaaccactttcattgcgatgctcgagtcaccaaccactgcgggaggagacacgctcgtgagctctagtgtgagagcatacagcagtctctcgcctcgtttccgaaagcgccttgaaggccttgttgccgtccacaccaacaacgatggtgtcactcaagaaatgaagcatggccagcaagctgttatgcggcgcggcgtcctccgagctgaacaccccgttgtgctggttcatccggtgacgaagcagaaggctctttgtaagttttatccagaatttcgctctacgcgatcatgttatccctaataatgagtgccgctagatgtcaacccggtctacacgaagaaaatcgtcggatttgaccaggaagagtccgactgtattctcaaattccttttcgaccatatcgccaagcgacaagacttctcttgtcgaatccgctatgaagctggcacagttcttgtatgggatcagcgagtcaccaatcactcgcagacactcgactaccccgttggagaccgcagacatggattccgattgactcctctcgcgaacaaaccaattccagcaaaggttgaagaggatgatggagaatgttcaaaagatgaggctcgggtgcaattaagtctgtgttgattacagtattcaattctgcataattttggcaatctaaaagagataggctgggctgtacataggatctgcgcacagaactaaagaatctcagtctattccaaagcggggggggactgtatatacatcggcaatgccatcaaggtcggacgtgtctttctcttatcaattacaacgtcataattggagtatttcacctataatgatatcacaacataggcactgctaactatattttccctatatttactaattatcctaagatgagcaataactaaactctcatgagtacggagtaaatcagattctttgtactttctgtttttcgagaaatttttggtagaacttatttttcttctccaatgcccgtgccttttaaaccatctgggcactgaacgagtatagggaatgaaatctcatctgatagggacgaagatatgcaagctctgacacctttcttctgccggatgaaatggaggcggtggagccggggatgatcagcacacgtcaaattctttagtgtaaaaactaggtacctctagtgacataaaagtacatactgaaacatcgtagaccaaagtactgataagtatccagtcaccgctagggtacctactccaaacggcgggccacgtgtttcagcgtcacgcaagagcgaccaatgaacgcgaccagaacacccacgtccacaacgtccacaacgtccacaagcgctaacccaaatcctttggagttaggtcgatatttaaaaatggattgatgtccccccttcctcgcattctatatccttgcaggtttcacgtacttgcctggttatgatatcatctactcatactcagctaatgtgatggcagtgttctctgaataccatgaggaggagggcctgcttggagagaggcaatatcaagcctggaaacagggaggccggcagcgctcccgaaaatttactgcattgatcctcatgttcctgctgggcacttttgctctcgttgtatacttcgtgaatggaacccattgcaaccccccttcacgtgccacaggccagcgcgacctacctctggcctctccccttgacaagttgaagagatctgcctgcaatgctgtcgatggcggttatcaatacaactccgagctttcccacaagtggggccagtattccccctatttttctctttcggacgaatcggccatctcagacgaggtaccccatggttgtcaaattacctttgctcaagtgatctcccgtcatggtgctcgatttccatcggcgaaaaagagcaaggtatatgccgagctcattgaaaacatccaagcgaacgcgactgcctacaagggcaacacggcattcctccgctcgtacaaatacgtcatgggcgctgatgatttggtaccctttggagtgaagcagatggtgaaatcgggagccaggttctacgagcgctacgcgacgctggctaaggaagctgtgcccttcattcgcgcatctgactcggagcgggttgtggcttcaggagtgagctttatcaagggcttccagaaggcaaagtctcatgacaaaaatgccaaccaccggcaattaagcccgaagactaatgtcataatctcagaagagcctgggactaacaacactctgaaccacagcgaaatctgtcctacgttcgaagacactaaactgggggacgaggtcacagaaaaatacatggcaatctttgtgcctcccatccgagcccgactcgaggctgatctccctggcattaaactcgaaaacatcgatgtggtcagtctgatggacgtttgtcctttcgagacagtgtcccagagtgacgatggagccaagctatctccattctgcgacctattcacccaagctgaatggaaccattacgactacctccagtcactaagcaagtactacggttttggcgcaggcaatccgctaggcccaactcaaggcgtcggtttcgtaaatgagctcatcgctagactcactcgcaccccagtggtggaccaaacaagcacaaaccatacgctcgacgcccccggtgctgcaacattccccctcaactacaccatgtacgcagacttcacgcatgacaacggaatgattccgttcttctttgccttgggactgtacaacggtactgctccactttctctcactcacctccagtcccctgaccaaacggacggattttcatccgcctggacggtgcctttcggtgcccgcgcttatatcgagatgatgcaatgtcaggacccggagcccctcgtgcgagtcctcgttaatgaccgtgttgttccgctgcatggctgcccggtggataaccttggccgttgccgccgtggtgatttcgtgaatgggcttacctttgcacaatacgggggtgaatggtcccagtgctatgaataaaggactctgaaaataattggtgcggcgttggttctcctttaacatgtgtttaacgataccctaagagtagcatccttactacatatccttattttggccagtgttaatgccatacacgttaccacgagatctgtgtcttggaaacaataagattgtacccaaatatataattgaggctctaacgcatgcaattcgtcaagaaagtgattcaaacagccctccaaccccaagaagcatcccaaatagtaaccagtacgttttaagcatctctgcatctctccttacctaccccaatgtgtccgaccattcccgctaacttcatgcggagcagaaagaacccaagcttcccacagaggcaactgctcacacaagacatgtacaccgtcatcccctagatccccactagacaaagaacgcagtctctcaattgaagtcctcaacggcaacgccctctccctcaccaaagcagagaggccatcacgcggcagcggggtagtaattggcgactgaggatccgaccaggtgccagccgcaaaaccaagagaagacggcataggaccaacatggtaatcatgaacctcgacaccgtttgagacaggaactgaatcaaagtgtgcggcgtaatcaatatccttcagaaccagccgctccagccgctccatttcctcgcgcaggacagctagcacatcgcgccacaagccaccaggccggaggtaaatgccgaggaggcggaaatcgcgtagctgcgacctatggcgacgtgccagtgcgatgatctcgtctgcgctcaggcgccagccttggatgctgagtttgcggagggttttccagcggatatggtggaagagtagctcgaggtcgagatctagtggtgccttgctgagaaagccgatatgaatggcgattaggttcttggctgcgacgaagaagcggtggaagacacctgagaggtcggccatggttgcggtgatgtcggttgtcgagtggaaggttatatcgaggcttgtgaggcgtccggccatggcggcgaggattgttgacggggcgcggaggagctggagggttgcctccgggctgatctggggccctgtgaagcggatggagctgcattttgagtcgaggagggcaatgctgaggtttgtgactgcgcgcgagcaggcggtttcccagtcgaagcggatatctgttgcagtgccggtgccagttcctagtgagcggtcgcgtatgaagtcgatgaggtattcgtccgcttcatcttgaagccttaggagctttatttcctgtaaggctgagaacgccgcaattgcacggcggaggcgggctaggtccttgttggtttcagtcaggttggtttgttcacgcagccggcggctgtgtaattgggatatttcgggattctctgaccccaaagcctgtagtgtctggacccattctgtattctgctcttagtcaatttgctcgcttgtggttgagagattgaagagctgataccgcttccttgataaaagggccgcaccatgtacgtgatggtcttcacatagtaggccagctgcatatctaccagctcatctaatcgccggaagccgtgatcagagaaacgtagagtaaatcgattgaacttgtaaggggtgccgattcgcatgaagcgcttgcagacgagtcgaaagtgatcaagatcggacacttcgttatattcatggtcactagacccgggagtatgtccatttccatgagatctgctgcttagggctcgaggtccgggttcgagaagaaaggacaagatctcgctcattagctcgtcagcgagatcatagatgtgacatggagtcatgatcggcgcgtgcagccgaagcatcgcctgcttgtttaagtggcagcaacatggaaagatggaggaattgagggaaagtcggcgcttcttaagctatccccaagaccgaagaggcgagtcacggagggaattgggaagaggaggggaaacgacaaataaaaataaaaacaaaacacatagctaatactcgactcgtcgctgttctcctgcagacactagtaggatagttgacttatctcaccgtgcatggcgagagctctcgccctaacgattgatttcgcgaccggggacgatcatcaagggcctggtttagcgccctctgcactgacaagccgggctttctgacccgatccgcttgatttcattggtgacgctgccacacaggaatcacatgattgattgactctgcggccagccagcgaacctgcaggaaaggcttttcaccaagagcgcgtagtgtcggggagggggccaatgtagaccccgccgggaagtcatcacatcatgcagggtgatgggccatgcgtgcgaattatgtgtctaccaagaatgattggaggttaatggccgaaatcacgatgaactaatgtgtgttcatgtgtccaggagattatctactagcgaccgaatcttccgtataattacgtgccgtgtgtatgcacctatcagaccttcgcaagatgggctcggcgccgtctgatatccgtgctgctgattttggactcgaagccctcgccatcagtggccgtggttgcctctccagactggagtacgtccacctcgaacacgtcaaggcttttccatcccttcttcacccgctcttcgttgacggctgcccctcccgagtgtgtctcctttgagacaacaattgccccaaggttctcctcggtaatcgtgggtccaaatggatcagagatttccacaaattcaaacgctaggttgggttggatccttacgaggacagtcttgccattgggacctggcgcaaaagcacgttcaatctgcggtgatttcttttcgggtgagaaatccataatggccgtcaggaaagctgcagtactctgccaacgctcctcccaactctcgagaaattcggcatactttttatttaccagcagtgcatccccggtcaccccgatggtcaagcggcccttctgcccccggtggagcggttccagggccaatgcaactgctgtgaggagaagcttgtgaccaacatgaaggtgatcaaatgtgccaccaacgaccacggaatagtgtggagtggatggatgttggttgtcaggaattaacaaagggtcagagatcgcccagtcaggcttgcttgtgatggcttgcatgcttgccgccgtgatctcccgatcctggctgccaacactgttggtgaaggaattagccaaagtttggccgacagtgttgggtagatagaaaacatagttccaacggcgcctcgaatttgctagtgattggacgtccagaatgggcccaaagcgagagctatcggcctggatggccgaggtgttctcgcttgcatcgacaaataccacccgggtatcaatgccacctggagagtccaattcaattttgtgtgctgcacagacagcaccaaccagcgtatagacgctgctcaagtaatgttggagttgggcaaacactttggcccgaggttggcagctcggggaaagaagatctggaatggccagagcaatatcgagcacagctgtacgattggatccaatcaatgcatttgagagtttagtgtagacctccactaaagacggctggaaggcatctttgacttcggcaaaagaaaaagctggaggcgggggaagtagtagtaaagccgagggtgaattggtatggtcggaagccatggtgtgaagaatatatgactacagcaacgagcactggggttaacattcaaatccaagaaatggaaaatcaacaagaagcgagaaatcaaagaaatcacagaaccaaaaagaaccacagccctcaataagtgatccccatcacaggctccaggagggctggggtaccggctgagtcagctgttctcgtgggatggatgacaccgccctctgtcctcctacaactctccgatcgagatgaggatgccattgagagccaagtgacctgacaagctggaatgatatctggctgacacggtcgtctggttggagctccctcgaagccccgctatatcaccgatttggtgcatcccctaacctccttcactgatctcgatcgagaaacagtggagctcatcctccaactacgatccacaccatcccctgcatagacagcgctcttgctcttcagcatagaccgcatcatgtcaaatcccgcttcctacgacgcccaccggcggtcagctgtgttcagtcgccagccggaggagcttcacattccgtcaaccgggccaatcaatccaaactcgtcccgccaatcctcctcgcacgactatcccgccacgtcggacgcgggtgcccggcttccctcaattaacgtacaacagagctcccaatacggcggcgacgggaatatcagcagcagtgccctccccggagccttgcaaccagggaatcagaaccgcccggctgtagtatcaataaataccgctccatcggtcgtccctaccatgcagcagtcatcgtcgcaaaccaaccaccgagcgagcatgattaattcacacggacattcacgatctagcccggccggattcgaccaatccatgtataagcaacacactgcgcccgatggctcgaagtatccctcttcacctggggcatttccccctcacactcctcaaggctcgaagtactctccccttggtctggccgatatcaggccatccggtgaacacatgttgagcgaggcacttatgaaccccgggatgtcatcaatgtcttacaataacggagacaatcaggtgccaaccaacagcaattatgtggcaccatggcctatatacgcagtggattggtgcaaatggcccatcacgggcaattcaggctttggtggaaagctagccatgggaagctatttagaggacagtcacaactatgtatgtgcattcaccctatacatgaatatgttcgcgctaaacagttaacagattcaaatcctcgatacacactggacgcagccagatcccgacaccccagatgcggctgccggagagataaaactggattatgtgaaaacggccgaggcgacacattcttacccggttacccgcatcctctgggagccaccctcatctcagaagcaatcgactgatttgctggccacgtcaggagaccatcttcgcttatggtcactaccgaattcccagcctctccaaagctcgaactcgatcactcgtaccgcgaaccagcgagaccctgccacctccaagctttccccgctggctttgctgtctaactctaaatcccccgagcacactgctcccatcacctctcttgactggaatacaatttctccaagtctgatcattacgtcgagtattgacacaacctgcaccatttgggatattcccacattgacagcgaagacgcaactgattgctcacgacaaggaggtgtatgacgttcgcttctgcgccaacagcgtcgatgtttttgtaagctgtggtgctgatggcagtgtgcgaatgtttgatctgcggagccttgagcatagcacaatcatttacgagccgacggataagagcgagaagcgtaagtagtcttccaggttataattacgtgctctgaatattgacaatatcttcagcagtgatgagccccgggagctccagcccccctggccaatcgcagaccggcctctaccctccacctttgttgagaatcgcaggtatggacgacatgaccgcaacatggcatataatcacaagctaacacaatcccccagcatctccccatgatgcccatctcctggcgacattctcacaggactccagtgttgtccgtgttctcgatgtccgacaaccaggccaagccctattggaactgaagggccattcagctgccttgaactgcgtagagtggtctccaagccgtcgcggtatcctcgcatcaggtggcgacgatagcatggttctcctctgggacctcatcaatcaacacaatgctgcaccgatcgcctcccctccctccgtcaccccaggagcgccgccttccacaacctcggagcgcggccccgctggcgtctggcagagcgaatacgaagtgtccaacatcagctggtccccacaaggcgggcccaaccacaccggccagccacgggaatggctaggagtgtgcggcggacgaggactaacaggagtcgcgttatgagctatcatcaaaagaggtcttgatttccatatgtcgtctgttttcatccttggcgctttccgacaactatggctcttgcattagatggttcgatctctctgatatttgtttctgtttgccgcgatctattacctcgcgtgcgcacagcatcccctgttttgcttcgttctgtttgtgtgcttctctagtaccggtcggcttctctgtctgacccggtacgttttttgcataggtcgagtgagaacctggtgatcttcatgggctactcttggtctattgattggccatacttctgacttgcttggtacgagtgaatgaatgaatgaactatacattggatatgggccatttgctattggttgagaacggccttgggacacccattctacgtaaatcgttgtaatcatattaccccaagcttatagccctggtgggacaactaagatttatcatagtggtcaattccgctgtgaggatttgactgttcgaataaaaagcgcgtatagcttggggctctgtgaattcttcatttcactgcgtgtatgaacatctactttcatttccagttgaaacagtagcatggcgtgacgtgagtcttagttctgtcacgagtctaagtaacaggaggtggatcgaccaacggtcccatgcagtaaaaataaccaagacagctcgcccagcgagcaggtatcatatgcactacaagtgtacccagacagagaaagcaaccactaaacaatgacagtctaatatgaacaggtttatgctaagcagtctcactctgcgtgggtagccagggttgggcgaccgagcgttggacccttggaaatgagacgatcttcgagtgagcgcgcaaatttgacgctagggatgtccacggcacgccagaacacatcgcctagccagatggagacggggagacagatcagccagccaatgaggaagccgaggcagtattggaagttggtctctttgccagtaatattccagatgttgggcatgatggagtagcctagacaatggaggacggggccgtggacgacgtagaaggcaaatgagatatttcctaggtattgggagaagggattggtgaatagtttctggatgtcaggggagtggttgatagagaagacgatgagaacggctccgatggtctgagcgaagcggtgcggctctggataagtcttgggggtgacgtgccacagccagccgtagaaaggcgtccatttgaaaccaatgttgggacatgagccgaaatagagaccgacgacaaagagcgagatccataggccgcggcgagagaccctgatggcgattttgctaccgggactgaagcgaatagttgttttgtcgtcttctaccgccagccgtgcggatggctcccaggtcccgttgataagatccacttcggccatcagcatgccgaagagaaataaaacgagttcccaacgaccataacgcatgcagaaccaagtcaaaccagagactactgtcatgcgcacaggtgctaccaagcgtgatgtccccatgatgacgacaaataggataagcgaggagcggaattcgagaggaatcgtccaaaggtgcggattgtagtagttgtagtaaagcgcatagtcaaatgggttcatcaaggtcgccaatgtgacccacaagtcatcgctttgtttcgagaaggatttatacacacgtggatgttgctcgttagtgccgaggattgtgtgtccttccttgatgaccttatgggagtaattatacagcccgaggcgaaccgccacaaagacgcaaagaattccagcaattgcggggatatatagacgaaatgctcggcggaaggttcctgatgcgagcacggtgaaagtttgatcgaaggacctgctccgaatggttttcagcggcttgtatgataaaacgtagccagagaggacaaagaagatggccaccatgatgtgaccagagatcagcatatggaaaaacggcaactggtgcatcccaaagttttccccgccaaatccccatcctatcgcgaccttccatgtgtatgtgaaaaggaaatggaagttgaagaccagcagacaggcccagccacgcagcccgtctagagctgcgatggagtggagcttcgcaggctggggtggcgagctgcctgagccgtccacccagtgttgtaggaaacttggcgtgagcgcaagtgtcaacctgtgccatgcgtcttcagaatatgccagccagtcttcttgcgacacctcgggatgcgcaaggatgttcgaggggtgaaactgtgacaagccattcccgcggggtgtgatcgtggagtcaggttccgaggaggcagattcgagatctttcaaagggatgtcggaggccgaagtcgtggcccgattttcgaggtaggatgccatattgttatgttttgcaggtcggtcggtcgcaactgggcattgccggtggggccaaaccctcaatacacacgccaaaaggcaaatgaaagcatttaggccggtatagggtattggggaattcggcaaaggggaattgggcagttcgcgcgtccagccagatgcgataaagccggtgatgcgggctgaggtcggcgaattcaggcaaatacgtcagcggaaggcctgctggttcaccgccactgaaaattgcgaaatatgagggagatggaattcaaggatagtctaagggagttgaagagttgaagagtcaaagtcaaagagtcaaggagatcaaagtaaagacaaggcagagaggcgccgatcgattgccgttttcgttaagccgcgttcagaacgagtttcgatataaaagcacttggtacggagtattcatatgagtgatcatatgagtgaggctatagttcgagatcaaattgcatgtgaattttgatctgcatatatgtctatggatatatcccggagacgtctgacgcgtcagtatcatgcagcagggtagtcaatagtcctacatatcctacttctcttcgttgaattgctgacggttcctatgtgacttcctaaattaatagtaaatagattatcaaatttttagtattcgagtccgcagaaaagtaactagaccgtttactcgtcaacatcaacatcatctgaatagccaacagggaactaatatcgacaattcaatatagaattagcaccccggaactaacgtccgatctaaaattcttagatatggcatgcactgagcctgtaccatcattaccaagctcagaagcagaagcagaatcagtatcagtatcagaatcgtcaaaaggtttgggctcgtctcctccttctccagtctccagcgaacttgggcagcttcttgatatcatacaccataacgagccaaatctcccgtagatcctcacgaacagaaatcatggtcttctattagcgatctgtcctccaaaggggccttgtaccatttgttaaggttgacatccatggatagtgtatagttcccaaaacagcttagcgtctgcttaactgcctcaggtgtctacgccaagacatcttgagatcacaaccgtggcctttttaccgtcagaggagactcaagaggttgaaagatatatatcacgtcaaagactgttagacacttgtatgaattatgtgattatcaaaggagaatggacattttccatgattcgctcgaccaagttctccgaatgcatcatatacttcccaggagctccgttttccacgggagcttcgctgaacattttcgagctcccaagcttccaacgtagaacttagacatctctgtgatcgatacaaattggcgcacagcatagaccattggaccttgatgtcgcaggttccctaaagcggcgacgatcctctcagctccctgattcgcgcgattccgcaattcaagaacttctcccttcctctttgtccatccacgcttattgtcccgccgccttctttctgcttcccgacatcttgcaatacaatctgaatgtcgcgatcgtctgtcgcgtgcatttcttgatcaaagtgctcgcgtggtcgaagtggtcccgaagtgggtgcagtcacgatggatttgcgcacgatcatgaacaccgacggcggcgcctccaatcctccacccccaagcaactcggccagttctcccatatccgatcaaaccccccaaaagcgcccgaggaaggctgcttcttactcagaatattctacacgtccgccccagcctcctccgttgcaacacccgcagcacgcttccccagagcgaagctcaccttacgcatccgttcaatcgccataccaacaattcagctcggcccctgtgattaatacagcggtgaggtctcagcggagtcagacacctccacacgtttcgacaccgtatggtcccggcacgcgtgatccatttggcgcgccggcatactggtcgcagccccaacaccccggtggtggtcctctggtttcgccatacacaccacagccgatgagtgcgggaccacaacacccagaacaaccgtcttattttgcccagcagcgttctcaacagcgttctcaatcactccaatcggtgatgacaacaccccgagctccaatcgaatctttccgcagccctcctgttgcatctcaacctcttccatcgcagcacttctctcccgccgcacaccgatctgttaccggcacccccttgggtcctcctgctgcctttgctgcccgtcaatctccgtcaactgcccgcccgccgtcctccggccacaattcccccggcaatcccctatccagcccgaggcccacacgggaggccccgatacgagatcaagttccaacgcaatcacctgtgactcagcgacagttctctccacacagttctcaaccgcccgagccgactcgcctcccttcaggcggctcaaagcaagagccaaccgagagcgccagtccccaatccatatcccgtcacaatagcatcgtcacggcctcggagtcagcgaccgctggtcaagttcgttcttccgaagaccgaatgctggttgagagtcctactgcacaaaagtccaccgtggcaggatcagatttcctaacctccccattggcaccgggcagtcaaatgaacagttcaccctccgctcacggaggcgcccatgccgtggacatggaaatcgaccacgaaccacgcgtcgatatacaacagcccaaacaaaaaagaaggaggtacaacgagcctccgatctatgctcggctgactccccgcaacacaaacagacgcccgattattcccaatccccgtcccccaattccgaaacatgcgcgaaaaagccagcaggatccctccgtagctgttcgcagacggtcttcctcgacaaaggctgtcacacccgccgcgcgggtcacacgagcacttcctattgcttcaccaaacacaagtgtgcctcgcgtccaagcttccccagctccgcccgctccctcacttcgtccgccgaattcgcaggtggtaggctcgctgggcccttgggagccgtccattactggcttcattccacacgaggagattacaaaaaccctttgtgatttcttgtttcaacatgtggtcatgagaaatgatgtcaataccggcccagtaggctctgttgcggctgccagtcaaggaactatcatcgaaattgaggcgaaattgggccatattatcgacttagacagcagagagcggattcacctgccaattttaaccgagagtgtcctcaatcgagagaatgcacgaattcggacatcctttgagagcaacatgactgtggtaagttgataattcgatgtcctatagcgaggatgcctcgacctcgatgaagtttacttaccatgatccacaggaacaacacagagctatgaataattttctgaatgaggctgtgaaagcttcaatgccccagcctaactcgacacgaatcccacttgcatacgtgcacaagaaagaacgtgacacattctatgagattcaagcagccgatttgcccccggtgatccgtcaaaatttgaacccgaggcacaaacccaaagtccgggtgacaaccgatgaacgaacaggtgaaattctcgcaaaaatcgtcaaatgtcgagttgccgacatggacgtctgcagtccgcggacgactgtggactggcgcgtcagtgtcaatctggaaatggaatacacaggcgatgtcagcaatctcccagtgatagatgcagcggtcgtgaaaggcgcacgaggggatcgcatcaaggatcgcatgagctaccgtcacttggcgtaccaggtggacttgactcaggtagccaaatccgatgtaagtttatccaactgttctgtgtcaccctcaaagcagtctgctgaccatattacagcaacaaccgggcaagaatgagttcgagcacgagcttgaagttgaggtctcggctgatgagattcgtcgtcagggcaagcttgctatgtcgggcgatcccaagaaccagtacgaggatcttgtcaagggctttgtggataatattcgtctgctggctcgagcggtgccgccataatggtctttaccgctttgtactatgtatttttttctgattcaggctttactggggtttagtttgtggttcactgcagatatggtttttcgttttatggtaaaaagtacgcattgcaatagacatcatgcatgggttctatgttgtttctagagcgacatcgttacctagacaagggaatgtcccaatccatcatttggttcgcctcggtttgacaaaatatatcctgtgtagatgttctataaaagaaactaatacccatcccatagtacttgacgaccgattcgagaaccttgaagacagcatcactgtatatatgctccacatatggtaccgatgaatcttttagatactcaaaggtaccgtctacaactaaggtagtatcctcagtctgcgggtcgccaacattgaagcccatcggcccaataactagacgtatttcacaagcgacccgccaccacaagcgaccatctccagaacacatagtaattgtgataaattacaacctgatatctcaacaacggtggtctataagaggtttttcttatagctcaatactgacacacttgatttatgtaaggacttcaaatataaaggtaaatacctaggaagctttttgatcactgccaaacgagtaaaattactcaactaactagttagatacctgactatttcgtaagctaatcgctcggaataaggaataatagcaaacaggtaggtgactctatatactctgtacatgagtcactaagacatatgaaaaaaatatgaaaatgaatggatgtaggctttcagccatgcagctcacgaataaaaatatccaaaagttgaaaatcaccaagccggcagacgggaagtccatttctgcaagaattgaatgcgcttgctattcatggtcaggggacccattccccacgaatcgcccagccacatggtcttcgcagaggtcttggtgcttggcttaaactgcggcaacccatttccattagggtttccagtgcggatgaagttcgcccagtagttggccatcttgttctcgacagcatagtcctcgctgttccatgtaacattggagtacgaagcgtagggaatgttattgaaggtgtaccagagctcggagccgtggtaagcaccctcatcgtggttttcggcaggagcgtgagtgaagtagtaagtatacacgttactcttggcgccgcctgcagcccagtcggcggcccaacgccaggtgccgacgcggctgagatcacggtagaactctttagcgctttgcgacgcctgggagctattctcgccgggatacaaggcgaagaaatcgtctgaaaggtcgccaaagaggttgctgtagagatcgtggtagtcggaagacgtgtaagacaggtctgggctggctccggactcgtccttgttgcttccagtaaggatgggaatatcggcgtgagaattattgcgcaacgctcccgagtagttatccgtgaagacgtatccgtcgatattgggccgccacatagggggttccatgaatgtggcagagaggttagcgaaaggagtgccttcccaaatggtatcggagagcgagtcatattcaaggagagcctccatagacacattccgcaactgggcaatggatgtcacattcatttgcttgaggaacgcgactccctgctcttcagcggctttcttggtccgatagctagtggcaacagttccagtcatgggatcgtgtgttcctcgcgcaccactctctgatatgataccttcggcgaggccctcagctagcgggctccacatagcatcgagggcactagcagagccagcggattgcccgccgacggtaatttgattagggtcaccgccgaagagttgaatgttctcgttgacccagtgcagagctgcttgttgatccagaatgccatagttgccagaactgttgtggcctgattcagcagtaagttcggggtgggcgaggtatccaaatggccccaaacggtaatttaaggtcacaacgatgatgtccttttgtgccaggccagtgccatcgtatgtcttgacatcaccggaaccaccggtgaatcggcctccataaatccagaaaagcaccggcagcttcttggcggacatattggtctggttcttgtaggccggagtccaaacattgaggtaaagacagtcctcactggttgtggtcttgccactggagaagatgccagcatcgctgattgtttgcgcgcattgtggtccgaattcggtcgcattcagcgtgccccatttcgatggaccggcaacctttgtccaacggtttgcacctgtaggaggctgtgcataaggaatgcccttgtaaacgaaggctttgtcgcctccgcggaagggtgagagaccgccatggattgtaccgtagtgggtgtcgataaccggggggcttagggcagaggcgatggacgagccgcaggctgccacagtagcgagtgtggaaagcagcttcatggtaggtataaaagaaagaatgaatgaatgagataaagtgtcagacaaaaactaaagactgaagagaaagattgtgagctcgattgctacataggtaatgttacctttcctaatatattgagacatggaaatactcctaggagatgatgatacgcggccgctgagcaacgatctgccctccatgtttcctcatccgaaaaggacactgatgattatgtacagtttgggtataatctgcatctttagtgagcactcgtttcaaactttggtaggagactcggatataaatgtggagtcgcagatctccgtcggggctgcgttcttattcggggagatcgtaaaactccggcaggtacccgcatgtggagcacatcctttcctatccaggattagcctatttcccaattgaaaattactgaaaattactgaaaatgtattttttttgcatttgctctccttctatatctaccaatatgaactacagtcattatatatgtacatacatgtggctagttactatgggtagactttccacatgttgtcggagtatatcgccacacttgtaagactgttgtaaagatgctaacactgggctaatgctgtccttgcatcggaagtctcaatgtgtcttcaagactgcttaatgccccttactgttcatagtgggctaagtttctttgtattgtgacctaggttatagctgcattctatatttagaatgaaatccattttggctcaggctgttgagtggaattgtgctcggccgaacaggtatcataaaagaacaaaattacggtgatggttacttaatttggtcaatatcttttttaaaaattatcttcattcgggaggaaactgcaatccctatccccaaaggcttatatcagagcctaatctaacctctgttccatcttaaataacaccagccgcaagacagagtcttgccaatggcgatagaatgtgttgaccataagtacttacaaggaacctatataacaaaattctgtctcacatggcagaacgctagaatcaagagtgaaagttgcccagtttagtactcgtgcaaagtggacatccagcgacggaggaaggcgatgcgtttcttcgacgcggcgattggaaccgcaccaaaggagtcgccgagttgcatagcagagtagttgctggaagacgcagggaagtgaactaaaccatctccgttggggttacccgtgcggataaagttggcccagtactcggatataaccgattcaatcttgtaatcggtggcattccaagtgacattggagtagtcggagtaaggaatgttgttgaaagcgtaccagagctcagcaccgtggtatgcgccacccgagccctctgcaggagacgaggtgaagtagtacacgaagacatccttctttgcacctccggcagcccattcggcggcccattcccaagttccaacacgggccatatcgagcagtacagcatcgctattagcgctggcctgggtgtcggtcttggcagggtagagagagaagaactcggcggagtagttaccgaacacctttgtccacaaagtcttgtaagtggaaacggtagaggcacctccatcattctcgttcttgttgttaccagtcatgatgggcacatcggcgtgggcgttcagctccaaagattcgccgtatccgtgacggagcacgtagccgtcaataacgggacgccagcggggaggtccggacaagaggtcagagaaggcagtgccctcaaagtagtcgtcttccatcaattggccctctccgataaggtcagccatagggagcttgcgaagctcggcaatcgacgagacgttcatggtcttcaggaaagtgacaccaaaggcctcagcaacggctttggtgttgtagctagtagcaacaccaccagtggcagggtcatgaggtccacgagcaccactttcggaaataacaccgtgaatcaaaccgcgactgagaggactccacatcatgtccaatgcactagcagatcctgcagattggccgccaacggtgacttggctggcgtttccaccaaagtgggcaatgttgtcttgaacccagcggagagcaaactgctggtccaaaataccgtaatttccagagctattgtgtccagactcagtcgataggtcggggtgagcaaggaagccaaaggcaccgaggcggtagttcaaagtaacaacaatgatatctttggacgcaagaccggttccatcataggtgatgacatctccggagcctccctcgaaacggccgccgaagatccaaacgtagacagggaggtttttgttcttaatctcagtagcggaggtggtgttgtaggtaggggtccagatgttcagggtcaaacagtcctcactggttgaattcttcccagaagagaaaataccagcgtcggagtatggctgggcacactgaggaccgaactcagttgcgttgagtgtctcggtccatgagtcgggcttggtgggaggagtccaacgcttcgacccggtgggaggtgcggcataaggaatgcccttgtagacagttacgccgtcccggaaaggcgatgctgcacccttgaccggtccatagttactttggatgacggggaaaacggccgccgcggcgaaggccggggtggcaaggagaatagaaaggaaggtcaacattggaaccttgaagatgttctcgattgactgttatgcgaggtacagattaactgaggggtgatcagcaagaccttatatatagtccatggatatcgatcgagccctactcaaaatagtttcatgtagaatcgataattacgcggactctaggctaagcccatgtggagctcatattggagaatgcttgcctggagatggaactgcccctgagtatgactggtacttaccgatatccacactgtaggagagaccaatggctgtctgtcgggcttcgacatgcgccgcgcggcatccctgaagaaacatgtttatttgacgcgacggttgatctgcagtggctgtactccaccgatacaaaagaaaaacaaattggttctgaaaatgacgaagccggcaagaaagtgtctccgaatatgccgaatgtccgagacaccctagtcccaatatggaagtccacaccgaagtaaatatcttcttcggcttctttggccagctaatacgatacctcgatgtttcacgtcattatttggtttcgcagaagtgtcattccattttgcatgaagcagatccggaaaattatgcttccagaatatttctcgcctatcatcattgattgagatcgacaaaagtctggagaaattgatacgatttatatgaatataataaatcccccacagttatatgtcaatctgactgaaatccttgggttaattgcttagtgggatcatcggtataggtgcctgaaagaggacataaaggagcagagactgaatccacttccgtcttacgatatggaagatctacagcgttgaatttcccagctacaccatcatccaatgcttgaatagactctccagtttgatcagtggcaccaacccgttcaaccacttcggcaactcgaaacccgaaggtgtcgtatgacctaacgctttcctcctaggcatatacaaaatagaacgggttgttgtgaacttgtttcgatatctatttaatcgctcccacgcccagtcctcgtgattgtagtgaaggatgcatagcaacaacctcacggcaacataacttttgtcggcagtagcctgcctccgataacttcaaactggcttcatgtctgccgagcatttcaaaatgttaagaggaccgcgccaacagaacaaaagatagcgcttcgtaccttgttaccatgtgctagtgtaagtccaaccatcacaacttgcaaacaaaccatattcgcgatatggcccagagagttaataagcgacagcctggttaactaaatagagtgttcctgcttctggtattctatggtagcctgtatatggctctggcgcgtagccctaattggttctgggccgtttgccctggatccgacggcatccgacataatgcaggactcggttctctgcttctgaattccacggcaattcttttctaatgaaacgtacattagtacaatcaaacacctctctccagtccattcataaaaatctccttttcatgaccctaagaccaatacaaacgcacgctattcccaatctggaagtctgacgcaacagatactcacctgcaaccacgaaaggtccgaagggaacagcagaagttaacagacctccatcagccatttgaccatagtccattgtacctcaaggccctttctctccgcacctccaatgggtgtgaaactcttggataatatccggatcacagaatacatggcttatcgatctacctgcattctcaagtaggtggtattggcggcactggggtaaagaatatcagtgcagccactactgggacttccaaggggatttggctatatatcaagggtttggtcacgtattccaagagcagtcgagacctaaatctctgttggcacactgataaactggagtctggcacacatcattatctctggaacatactcttcaactctacgcacgtctacagttcacgatatggataggttccacgctgtatcctcttttgaggatgaaatagaccagcctccgggcacatttaaacttattggaggtgaggctccttttctcctagattggagtgtttattgacagtatcctgatccagacgacgcgggagatgaggatgggcaatgcatggtccttctctatccgattccctcgtctgacccgaatgtacctctagtgagtcggcactggattcatatctccctgattgagctaattccaacgcatatggatagaactggagcaccatgcgaaaatcagtcaatttcacaattgtgttggctatgacaattgttatcttcacggcgtaagtgaggaggacaatcatctcagattggccagactggtaacattgctcccatctcaggttatcgatccaagccatcttttggcagcagatgaccgttgacctggaagtcacctataccgaattgaacaaagccatgtcggtaaatttcgtcggtctcacaactggttgcatcttctttatcccccttgcgaaaaagtacggccgacggccagtttatatcgtctcaacagcactaatgttgactacgtcattttggacatctaaaatgaacagtttgacagagctgtacttgaccaacttactgcaaggtttagctggtgcaaccaacgagtcgatagcagagataacagtgagctatgtctttgggccgatagtaagatgtcctgttaatgttgtacagattgccgacttattcttcgtgcatgatcgggggagtatgaatggactatacctgacatgtgtcatgattggtgtaagtctctcaaccaaatagcccggagatttatgcaggtacctgatgaaagcacgtatagagcttcttgacccccatggctgcaggggcacaagctacacagtatggctggcgctcttcttatcaaacaatgggaatcttcaatggtgtccttttcgtcctcttcctcttcatctacgaggaaacaaaatttgtctctgtgtttattgggcaagcccgtgctaccgttgaagaagctgatcaactggtctcaatcagagaagatggttcggacaattttgactcggggtcttccgccaagggcccttctgtcactgaacatactcgttctcaccatgtgctggacctcactataccgcggaactcctggcgcaaacgccttgccctggtaacgccaacaccagaaccaatttggccgcacttctaccgccccttctgcgtgctcatctttcccgctgtggcatttgctgcgtttcaatacgcggctggaatagcctggctgacggtaacttccagcgtcttgtcactcacattcccagagccaccatacctcttctcacctgcgcaaatcggatacactagcgctggtcccctggtcggaaacattatcggtgcagtgtacggcgggttccttggtgatcggtcgattttgtactacgcaaaacgaaaccggggttattacgaaccagaaatgaggttgtatatcttacaccttccagcgattttcatgacaggtggccttatcatgttcggtgcgacgatttctagggtaggtaacggcattaaaagtcaagttcccatttgggcttgggctctgttggtgagtgagtgctaacatgctattttccggattgcaggggatgcactggatctggcccaatattgcaggtgcctttttcggatttggtttaggcagtattagtgatgctgcactggtgctagtcatggacagttacagggaggtatgattatctcatttcgatatacatgatacttcttttgtttcaagtgagccgtttctactaactcctatttctagatcactggtgacgctttcaccgccgtgacgttcatgcgcaacgcggtcggtattgcaattccattcgcgatctctccgtggatccagcgcaacggcatacagaatatgttcatcgcgtgcgggatgctgagtctagctattactgggacgattatcccaatggtcctttggggcaagtccggtcggcgcgcattggcaggccgatatcgcgatattgtgaagaatggccatgctggttgacggatgtttaagtgaattttgcctgcgtgttttttctttggcgacgcggacttcctaggtgtaatttggttgcctgaattggggccgggtgatattgggctatgtcccccgggatatgttgcgaattgggtatttgatggttagatctttcattggataatttaaatgatatggatttttaccattcatggccatgaagttgcggcattgtatgtcttttcgaagagattcctgaagttgtacgagatgatacattgcagtggcttgaggattccttgataggatacatagtacaaggcactccaatttcgtcaatgtccgttggtcataggtttcacatttattcctggtttagaacatggaagcctgatctgaaggagagagcaggaatatgagaaaacccctaaccctaactcatacacgacaggacttagaatattattgcaatgtgattttgtttaactaggaaaggtgataggccgagaaaaagaatctacgtagtcagatgaacaaatgtatgcgtaagaggcaatttaaagattcgccttgtgcacgtcatcaccaacctctttcggcaacgccgcctcagcaaatctctcctccgacacaagcagctgctcagggaaccacgagagatccgaactgatcgtttcaccgagggaaggatcctgggcgagcaacatagtcgccaccgccttaccaccaagccaagcctgaaccattccgtctccaccaaacgcagcacaaacccactctgccccctcagacccatgctcagcccgacctgtcacagctccaggcaaccgtcctacccacgggaacccatcggagctgaaagccatactgccagtccacatcgcttgcactgagtcgccttgcacacggccccagtctttgcttccgaagatggcacgcagagccccagacaaatgaatatcaatgtaaagactaagatcagagtctgtcgagacgcccagatccgctaggccaccgtcctcgctctgcacgaagcctccgccgagcatcatctgtccctccggcagctgggtcatgtagtcgaacccgcggtcgtagttgaagagccacgaatgatcatctgcctgattggggaaattgtcaccgggggtctgcgcggacatttggccgcgaacggggaagattcggccccgaaatccgggtacaaggtggctgacatgggcattggtgcagtgaatgacgtgccgggtggttatggtgcctctgcttgtcttgaccatgtatcgttggctgttggcggtagtttcatcgtgtatagcggtcacggcggtgttttcctcgacgtggaagtgatccgggaagtccgcaagcagacgcgtgaggatgccggtgacaaatttgtagggccagagggcacctgcggggccggcgatgacacctcgggcacgagtcaaacagaattcctagaaacgacattagcggcacttggagcgttcggtatgaatgatcaacttaccttcgggatattgtctccctcataagatgtccattcagcggcttcctccggcatttcctccttgaaacggtgcatccgctccaaagccgtcttccaaggtttatcgcggaaatagatgctcaggaaccgaacctttcgtgcttgcgtctctgccgtgatgccaagctcctctgcgacagtgagcatctcccggagatgcgccaatcggaagcggatgagattacgcgcggcatccacgccaaggacatcggcgaatctactatattcgtcggctgtctccaggatgtgaccgccattgcggccggttgcgccgctgcacactgtgcgagcttcgagcatgacaatggatgggtgggaggtggaagagtgctgcgaagcgcagttctggagcaagttccgcgcaatagatgctccagtaataccagatccgatgatgacaatatctgcttccttgcgcagatgcttagctccctggctgaagttgtgtgggtttcgagtccagaacgacgaggtcgtcgaactttgggggaggcctgggtcggagtagatgcgattgagagcttgctgtctagcagaggctgaaactgaggggtctgtcaaaatatctgtagcaaaaggcatggttgctgaaacgtcaaagccacaatagagaggaaaagaagagagataggcgggagagaataagtaactcgcaaggagccagagtaggagatgacaacactccccaggtcttacgcgagatcgagaagataggtgggaagattataaaagaaaacaaaaaaaggaggctgaagtagtcaggcccaccattagatcgcaaaacagaagtagcaatcagaagtagcctttggatttgcctacctggtacctacaacagtaccgaggttgacttaccatgctgatgcacctattgactcccataatgaggtaatctcttctcaagggtttcctgtccgcggataccacctgagcacctgcatatgccccatctgatagagttcaagataaggcgctggtgggtcaatcttgtcgttgattgtggggattttagaacacatctgaacaccataagatcatgagaattacgggtatcgttagggtacactcactagctttttttccggttttgtatctaactctcattctaacttgggaagaggccgaggtcttgttacatttcacattgaatttaagccggttcgcgcggttagctgaatcgggtaataatgtgacttgatgttcgatctgggaatacctggatcgatgtgttttattcgagcaatttcccctcgacatcaagcctaagagatggtggtcaagtaaatacaaccaataaagtgaatttgaggttggagaggggcttgaataaatgacagcatacagaggggttgcatttccggttagagagttggagactttagagtctattatagctgacattcactctacgtcattatctttctaatatttgataatattaccatgcaagaatagtagaaatgaaaatgaagcgatgtgattgtacaacccgagtgttatcgcagactcgtttagactcaagcatcaccaagccatgtgggaaaccaagataagtgaaaaaagcggaggtggttacatcgtatcgcagccgagcaataaagtacatagaacgtacataaatagggagatagccataaagtcacaaacgtgaaaccacatctaccccacctctagaatgacatccaaagcacaccccagcagctggcaagtcctcgtcgctgccaaacaccatgaatgcgaacagaaaattccccgagactggcttctcagcgcagaccagctggcgctcgcgcaggaaacccctcgtctactagatattgatcttcctcgtcgcagtaatctgctctcggatatcgaattagagttgacagaaagttataccgcaattcagctgttggacaggctggcatcggggcacatcagttcgttggctgtcacaacggcattttgtaagcgggctgctattgcgcagcaggttgtgagtacagcgcattactgaaaggataaaggagcagtgggcttaatatatattttgtacagacctcatgtctcacagagaccttcttccccgaggcgctagagcgcgccaagtacctggatcagcacctccagcgggagggaaagcccattggtgcgctacatggcctgcccatcagcatcaaagacagtttctgcgtcgaaggtgtgcagtcaaccataggatatgtcgcatttctcgagaatgagcccgcgaagacgaactccgcgctagtggagatgctgctacagcttggcgcggtgttatacgtgaagacgaacatcccacagacaatgatggtaaaaaaacaccaaatgactcggaatatggtcaataagtgaatctaataatcacccagacagcagactcggagaataacatcttcggccgcacccttaatccacacaagacaaccctaacagcgggcggatctagcggcggcgagggtgcactaatagcattccgggggtcaattctgggcgtggggactgacatcggtggctcgattcgcattcccgcgctatgctgcggtgtatacggctttaagccaacaagcaaccgtataccctacggcggacaggtctccggcgccgtacaggggattccaaacttgattccagctgcaggtcctctggcacataacatcgccgatatcaagctgctgattggttccatcgtcgctgatggccaggcgtggaagtatgactctgctgccgttggagtcccgtggcaaaccatcccgcctggtatcaacgccagcaaaagcttgaccatcggcatgcttgctgaggataagcatttcccgcttcatccgcctgtaaagagggctctaaatcgggcgtttgaggccttgacgcgcacaggacatcatgtcgtccgaattggtggtgacgatgaagcacagagtttggcatatgcgtcacgtgttgcgtttcagtatttcaactacggcccgcacaaggatcttgtttcggccagtggggagcccgttgtgacttcggttgctaaggctgcgggaccgatgtcctctggcccgttccctgctcagcaaggtctaggaccgtttgagactatacaggcgttgcatgtggctcgccaacggattcatgatgtttggagacagacatgggtggaccagaagcttgatgtgattctggctcctggagctcagagcacagctgtgagccatgatacgtatggatggcctgcttatacggtgatatggaacgtcttggatgtaagtctttctttcttattctgcttgcttgaccttgattctctgaggtctataccaactttcgccgatctagtatcccgcatgcattattccatttggaaaagcgtccaaagagcttgatcccgatcctatgacaacaagtaacgatgcgcaaccagactgtcagtgaacccgtctcttttatcgaatagattactgacaggtaccagatcaccccgatgaggtagatggcgccccatgcgctatccaggtcattacgccgcgcttccaagatgagaagtgcctgtgggcggcggatatcattgaccgtgtattggccgttcatggcaaggaataatggaaagctatatggctgttggcactgcgcccacctagtcttcttaggcgaaagtctggctggatggctaggtatgctcggaaaattcatgggtatgccattcaagatcatacgagtttagtgactaggaaatatcatttggcgccggttgctgttctgcaagaaactaaattcaaaaggtagaatacatatgtgaaaccggttctgctccgtttgatatcttaaaaggagtgtggaaaggacaagatgttggtacttggaagagaaaagaggacaagaactacggactcgggctatcgtcgtaccgtggtcctccgtcattgccaccatacccggcaccaggtgtagcagccattccacccatcgccggagtgggcgcatcaaacgcggcaggggttggagcgtcatagtctcgttttgaggggccaccgggagtgggtgcgctgaaagctccaccaggggtgggggcactttcggcccatccgccaggagttggcgcgccaggggtcggagcagcgtatgcaccaggggtgggagcggagtagtttccaccaggggtcggggcatcgtcaaaatcacgttggtctctgccgccggacatgctgttccagccgggagtccggccgcctgtggcaccaccggcattccagccaggagtccgagatccagaggcgaaggcatcgaagccggagctggagtcgtatggtgtcttagatcctgatgtccaggacggggtgcgactgccaactcctccatatgcggtacggtttccgtcatacgggttcgcggtacgagagccgtcattcttccaggctggagtacggctgccattcaagccaccccaagcaggagctatataatgatgattagcaacttcatcaacttttccaagatgattgtactcacttctcgcagcagcgccactccaagcgggggtcctagatgaatcggcggcgattggtgttcggccaccagcccagctatctctcccaggaccgcccgaagaagtgtgtggagttcgccctccagggccacctcctcctcttccgcggcccatagagagaggctgtttggaaacgggactgtgaaaagttaaaaacactgtggaccaaagcaatggaggagtaacatactctttaggtgttaaaatttcacgcgggatgtgtacgggcttgttagatgtgtaaagttcaacttgtgcagagctgtcgtccgcgtcgcggacaataccgacgagacccttataacgacccttgcggatagtcacagtctttccgatcagctgatcgcggccgcgacggggtggtggcattgcggcaccacctccaggggtttgcattgccagggcagggttcatcttggtgagatcaggtccagtgggccgaccacctcttgctgatacggtaacaacattcgttgtccgcacgacggagatacctgcgttctcggcttgcgccttattatgcaagaaaaggaacgaacggtgaatgtgacggatgactccactgcgctgctctccgtagacctcacgaacagtatcaccacttcgaatctctgcgccattgcgatcagtagccacagcgtcgcgacggggctcaatcttgtttgcgatttgcgtaggaagaatgttgcggatagaaccattctggtctatcacacggagggactcccggtccactttgatgacacaagcaacagtggcggcatcgagctgaacgagatcatgaacatcgtagatgccgagttgtccatcggcagccatctcagcagaaagtcgaagatccttgctgaaaattgtgatctcctgcatactcatatcgctgagaagagtgacggtgtcatccttgacctgcacgaccatgcccaattcgttctgatatcgactgccgccgataaccttgacgtgatcaccttcacggaatcgtttacggagagttcgaacaggagcgtcgattgtctgaccggccagttcgccctccgtgacttgcaatgaaataatgtcacctcgagttgacactgtgcgaccaataagaccctgctgttcaccccggtaaacctccactggatcacccggttggtatgagtcttcggcggtggagttcttcagagtctcggccagtgacgccagatccagattggcagtcccatcttctcctccacgcgcgaacattgtaacctcctctagccgggggttcacattcttggcattcaagtgctgaacacgcatatccttaatcaggaacccatccacgtagttgtcgttcaagtagttccatgattttccacctagaccagaagtagacgaaagatattttgcgtgcttctttttcgcctctgtctcactgaagagacgctggggagggcggactgtgttgacagcaccgcgtttgcgtttagcatcggcggcaggggcaccaaaagcatcgtcattcatgccatagtccaatcgaggaacaagtctgacagtgacattcaatccattggtttcgacctcctcaatctgggccagatcgcccatgtatttgccacgcttgatgcgaatccaaccaccaggcaaaagctcttctgatttctggacgcgaagaagatctggcatctccttcactggaactagggtcagcttttgggatgggtagtagaagttaatggcctccaagccttcagtaacatcggcctgcctgcgcgcttcacagtagaaccagccttgcataatgtttccgcgttcaaaagccgagatgattcgaatgggattgcgggagcccgctgggcgctcttcaattcgtttctgaattgaatatacgacctccttttccttgccaggcttgcagcgaccaccccaaatgctcgggtcttccacgctggggagcaggagtcgtttcgggatcacaagggaatctgttgcggcagcacggttgcgtccatatcgttccttcagcatctgtgcttgcttctctgcgtccatgctagcgtcaatctcgcgctgacgatccagttgtcgatggcggcggtcgtctgtctcggtgccttgaggtagcgcgtcaagatcatccgggtgtgtttccatgccatattcggcgagctcatcttcctcatcatcggcctcgtcctcctcgtcatcgacaccggcctcgtcttcgatgaatggattggcaacgcgcttcattcgcttttgtggacgactcgcctgaaatcgaagatacgcgttaataaagatatcctccattactaggtctccatagagaacataccacatcctcttcctcatcttcgtcttcctcctcgtcgtcatcgtccacttcattctcgatctcctcgtcgtcttcgacatccttggcatcgtcctcttcatttgcatgtgtgtcgcgagggtatttcacatcgtcctgctcatcagcgccatcgccacctgagtgttctttcttggttggctgtttcgcactcatttgttagcgttttgtccatcgaggtttgaccgaaatgcatagaccgaccttgactttgagatcctcggcatcagactcttcttggggagcagggttaaagtcatcctcctcgtcctcggagccgaagtcttggttgagaaagtttgacattttggcaggtagtatctagcgcgctattgcagataatccggtcgccactttcgacagtatttagagttcgatatagtcggatttctatcaatcaccaggaatattagtgaccgaaaagacgaagcaaacatgcgaggaagacaaaccgtacccaaggaaaccgcgctacaacttgaaggctgggagatagatgtggataacaggatgcaaagtgtcaagtattttctgacggacagccaattccgcgcggcgtgaagtcaattgaggttgatccaaacgagagaaaagcgactggaaagttgagaggaggcacagcagacagttgacctctgcgggcaatcaccgagttccgcgaccgcttacaaagaacactgatcagaatggagacctctgggtttgtgagaagaaaaaatagcctgaccacaatgcaggctgaattatacctcttcttataaaggatagtttgagaaagggaaaataaggaattgaagtgctggggcgtggaggtcgagttgcccagaggcacaatccttgcgtagatggtcattgtggtgcgccgtacttggccgccttttgagtccagcactactgatgatcgtcggacacgttgacccacttttctctactttctctatatccaaatccccattcgaggatttacttcattttgacagcactcggaggtccaaactaccaaacggactatgacaagtgctacacgacacgcgagtcccctatttatcacgcgtcggaaaacgtagactaatcctgtgatcagactcctccatctggatagacaatagacccagaagaactcgactacgcaggtgacaggccaccggaggatggctgaagttacgaagttgcccagataggtggagagcttgttccattgacttccccgtcaaccttggatgaagtcattgatgtgatcaataagcgcggtctacagtcagtgaagtccaagaaggcacgaaaagtaaattttcgcaaacgatgtacaacatagcaatatgaattccaggcaatatgccctatatgatatgattaatgatctcgggctaatcctatgctatcttgaaggtttcccttattgaacatatttaataaccatgtgtggcagtaagcttggtgggggaagaagatgatgatattatgaaccccttggtgggggtgctatagcctatagctaactatgactaagtacctgtgataatatgctgggcctcaaaaaatctcggcctccggctgagaaaaaaaagaaaattttaataaaaaaaaataataagaaaacgaaaaggtaaaggtgcgatgtggcgtattagttgttgtatacctggggcggagtgtagatatatgagggcgtgaatttatacctggggttgtacagtggacccttggtagccgcttcgagaggagcttggcagtggttattatattctttattatctagtagtaataggttctctggtactgtcaggaccccagtactaagaaggctgatgcctgaagtatgagacctgtcacagtacgtggaagcacccgtcccgggtacgtgggggactatggactggacaggagcaatatgtgctgcctacatagtccctgtaggtcatgtaacccacaacctatatattatcctcgcatactacttctttagagaggcagctattagttccaatataccactgtatatactactatctctatttcccaatcctctattatatacagcattcccttaggcattctatacctaggggtctcaagatttcttataccctctatatagtatctatatagtactctttagggtactctttaacgctatcttagataaataagttatatcctattaatactttatatagtaactttctagttatactataagttattatattatatataaatactgcgataggaagctggtatacctagctatcttactcctagttagatatcggcaaagcccacccggcccaccaatgggctgggctttgggctgacttcttcggcccacgctaaattatgggctgataccctaggcccatagcccacgatgggggcccatatgggccttatataatacagtgatctacctacataattaatgcaattttaggcctgtattcttattacagcgctctcgtccaattataattcatacatatgctaagcatatgcctagcatagttaccaatatatatttaataatatatctctgcgatattctgatatatatatatttctaccataccaattgttacgaccccgagggtcacttgcacaactggcccatatgggccgatatacttgctaagtaagcgccaggggtatatacacaccgcgcacatgagatttagaaccttagcgattagtctactgaattgtataacccacgctagggacctccactctaattcaaacctccatttttaggatacactggtagctagtcctaacattctaatcgcttcatttttacgaattagaccactggaacccataagatacctcgaaatacccgtagcagaagccgggtgttatagggagatatacccctacctgccggttaagaaaaccaaacgtaggatttacaaacccctactgagataggggccatacctgccaaaagagccgctcctataaaagagggggctgcctaaccgataaaattggcaccagctttaagctgggatcttctgggctcgacaatttccctcaaagctcaccacgaatgcatgggagctttgaatttgcgcttcgatttgcacaagataaccaagacgtcagcagtgatgaggacgacaggaaggaacctataatcgatgatcgatttgctaggctggtgtcccatggccgcagctttatcgaagagagtgctgcttttcagaagttgcgagtggaactcaaaaacttcctcatgccgactttcaagcctatcttcctagatttcagattcgattcagatgaatggatgataagatgcttctggtgcatggaaaaacttctatcaagcatcgggcctttagaggagagtgattcgtcacatctattttctacccgaccttcagttctgacaccatctcgagagatagtactcttttctgagcctatagctcttgatacgaacgtccattccacagagctacctaccccttggtccagcattcaagttatcggatttctgggtcttagcttcaaactcaaccgcttgcagtgggcgcggtaagaatatcgtggaaccctcaagagcttttttccagcttcggtttgcaaaatttgaatcccttaccacaacatcaaatagtgctactatgccaaccatgttgtcaaagtgaaccttattataaaagttcgacgcgtttcacgtgggagtacgtgggagtggaaagcaatgtcgatatgaaagacttcaagggaacaatatcctgggacccagccaaacttctacgcaaactctacttgcgagagaaaaaagtcccgaagtatcacaaacggtttaggtggaagaatgtgaggtccaactaccttgcaagctcatcaaagtgctaataatcaacagcgacacggtaaaaggttatatgatgattacattgaacacgagcatggtgctctccaagccctccataactacctggatgctaccactgttcctaacaaagggatgacgcccagtgaaagtgtccagagctcctcatatgcggcccgtctctatacaccaaatgccccttccacacaaactacatatccattaacgaccattgatatcgctgaccagcctgcaaccaacccctacaattttgaaaccagcaacgtgttccatgatgttgaacaaccaactaaatccacacgctcactactcctcctcacttgcattaaacgccacggtcgacctgtcaaactccaccaagaatttgtcacgcacatcgccgacgaccgccaactcttccatgcattacgcaagatatattttaaccaccggcagaagtttgaattcttttggtctttgaggacattgcacagcatccattttatgagggtgtgtttttcttcttcatctaatgatgtcttgttttcttggtaccaaagctgggaccttacatcacctgccctaattttgacgtatatcatcctgacatatttttctcagttcatctacgctggcaactcatatattgacgtccgctgccatgctgaaatttgcactcccagtaatccttgcgcctgtgtcccacctcctggccttgttccaccccaggtgacctataactacacctaggtagacgactcttacctcaacgactgactaactgcatacccttacgataagccactgttcccgattggtgccggggaacaaaaagcacattttctccacggccatatcccggaacaatcgacaattttcagagctggctacttttgccttgtttatcttcactggatagtttctggccaatatatatttttcatgctatcggcggtatgcaaactcaagcaattcaaggttcttatttgcagctctctagtcgcattggcgatcttccgccagcctatatccaatccctggtaacctgctcctcaagagtagactgctgcagacgacgctcacgctgcttaacgccatggctaaactggcccagactgggtcgagtctgatatgccctccactggttttcacaggatataaaactccagcagccacaggtaaagcgatgagattataaaccaatgcccatgcgaagttgaacttgatcctcttaaagacaatgcgactgagatcgatcagtgtcagtaatgagtccaactgagacgaaacaagaatgaaatcggcagaggagatggcaatgtcggaaccagaaccgatcgcaactcccacatctgccattgtcaaggcgggggagtcatttatcccatcgcctacttgaatcaacgttcaacagtgctgtttcaatttttgtaatgaacactcaatgaaatttccttgtggcatcaccgcccgctgctgtctttccacgttcaacacatactgtagttgacgatgaaactaattgattgagaagaaaaaagaaagaaaaaagaaaagaaaaataaaattacactatcgttgattgattctcaacggaatttatgaccggaatccctgaccggaggaccttaagaaatgaaaatggtggaaatgaaataattcggacctccaaacaatgaggggcctaatgaggttgctcaaattttgatgagctagagtactgaagtgtacaagcgtgccggctggaaatcatccatccatgccccgtaaaaaatcaaagtaccagagttgatcaatgttgaatcaaaacaaataacgtcagccttcaagattaagggaacaaaaaacaccgaaaccgataaaacggaaccctcatggccgttgagtctgaatatttttatttcaccatgcttattgtttaagaaattaatgtatcccagcccgttggaaaaggccacccgcaacaactctagtaacatttgaccacaaccgttcttaaacctcagtgtaggccacacaatgtagatgtgccgttgagatggttgctcaaagagaaatcatgttcatgtgtgtgttgagtgatcaaattcatactgtaacttgttttcgtacccgttgtgctacagctgagtagtcgtataattcttctggcaaattcataccttataaaacctctctttttggccctttccctcgctgggttagtcacaacgtctttgcagcagcaggcgatcccgggcgatgaatacgatgaaaactacgaatcgctcgtccagaaaattgctgcgccaaaaacaatgtcgccgcaaaacaagtcttatgaaaaaagcatatgagtacagcaagttgtgcaacgcagatgtatgcatggggattcgcatgcgggagacgggccaggtacatattctgtcagcggattcttcgggcttttgggcttttcttgctttacaactagtaagctttattatgacgtcatgttaagaaataaaagctaatttgattagaactcctactatccgactccaaccttgacatccgaccgtgattttgagaagagcggggaggatgtaaaggtccaaactatgcaataagatttcaacttgttatctacttagaaaaatccagttctattgaaaataccgtccgttatgttgctcgttgcaaaaagccagctatgaactcgtgtagcttgaggctattaggagcggcggtgattactacagagcaggtgatcctaggccgtatccttctggctatggatctaagtactcagccagaaatggccaactagcgtccaaggtagcttagcagccttaattatctgaagtctggatttacttcagtgcacgctttcaatctttcgatttctatccttattatatcccataggcctactgtcgacgtttcgcaggtcgatgatgatcgctgttatgtcccatagaccagacctcaaagcggttagcgtgtctcacttcgttgctcataaatacactaatcccgaaaaggaaagtcggccactactactttcctagaaacttacagtatcggatcaggagtagagtagaatttacttctatgggccgggattcatggtgagacccataccagtaaagatactctgtaggaaagaatttcattatcattagcgattatttttctaatgcgaagctagaagttaaaacggggtggggcagggaaaccaaaatgagactggaagaacaagaatcaggaacttcggtacttcgtatatcctcgctttgcgcaagccggcgactggtgcaagagatattattctttttgaggagcagtgcgaacaatttcttcaaatggttgaattacccgaagagcaacaactgcgaccctccatatgagacgcgtctttccttcactccgtccatcgataagctcccactggagacgaacgttagaatcacctccaggagctaataccctcataaagttaagggccccggtcactgtggagtaattaagccaaagattttctttaggaccagggataccgtagacagcgctatagtctaaagagtaccgaatctctctagtaaataccctaagggtatcgccttcctagactaatataatagggcaaactgtgaggaattttttatccttaggctaaatagtgataaagatagacttatttcgcatcgcttctgcctttatttgtaagttaaagaacctaccgagcagtttagctgatactttatataatccgcttaattagaagatagtctcctctatactagagaaccacgggttaatagcgcagttctatacaatcccaggaatactaagtctatctattaagagcggttgccttaactatagtcttcctattaaatcgcctttactctccgcgaccactcgctcttccagttatttaatatagaagctatacctttcttcctagagtcggacaatctctattagagaaaccccagcttctaataaataacttttacagaagcggtcaaattcctttatatagtataaaagaatcttatcgatacctacgttccgtatatcgaacaatcctttctagaaaagacggcactacctttaattagcgaggctaagtctatagcccgcttctctcataaatcgctcggtagcaactttctcagccatcgtgaatttatctagagggcctttcgaagttagcaaatcctttaggtcaaggagctaggcgcctttcttaataatctcccaatatatggtttcgttaagccgagactatatacttttgcttacagagaatatattctcctaattgattagctagatagcatcggggtattataacttaataataccattcataaagctctgaatctcttcgaccttcgttatcaggcttacctgctttgaccgatgtccgtatcttctaagggaatcgttaagctttatacagttcacaagtatattctcaatgatcctatgcggtactttcgcgtattaagaaatgtctatggcggacaaagacgtcccatcctaaggtataatcattattacgttcgcctcggtcgtcaacgtaggttcggatagtatatcaccttcccgacttactacagagtgattcgcctcttgtgccgtatctttggcagtattatttcctttgtttcttcttttcttcttataagacggcgtatctagccctgagtagtccacttaacttcttttttcagatatagggaggaaccggtaagagccacgctttgcttctagatccggactagctctgggagtaagaagaggtggtggatctgttatgcctacctagagcctcttttcgcggactatacatgtcagtggaaatagtctgccaaggagcgttctgggcctcaccaaagtcagaaatgcctaggatgtgttgtttaataggttcatagttgcagtcgccgattccgcagaatacaagcaactcctgaactttccctgccgtcaaagactgaaaagcttcctccatggttgtattgtgctggggaagtcagtcacaagagaagttgtcgaggggagatgctgcgctgccgcgccaattttggttgcgcgggtgaaactaacccgaaacgggaaatctggagtctagaccctaccagaacaacatagaaaagaagggaaagcaaaagtgtgcgagctcaacgtacttcgcgaccacattgtgttcaatgtccggtatagtacacgtctcaagagaagtaataaaggagactccttgcgtgtgcgtgagcattcgacaacaagacgctcacattgtcctataacctctgctacgctgtctcccaaagtttcaccaaggcaacgatatggcccgtctcgacgtaggcgaccagttgaccgctattcgccggttgattgagttatccaatcaagcatgggtacctatggttcacattcgggaacatcgtgcaacttgggatagttgagccatattatgaattgcatcttgatcagaggagcagaggaactatgaatggtcgagatgtgtacttgaggaaaggacaggcttcacaattcatcgtttcgaaatgaaggccatattgaaattcagtgtgtttacattcctatcgtgtctgaagacaagctttacacttccaagagcccctgagcttgcgccttcagggggcaataatcgctatcatcatgatcatcctctctcttctctcatcttccccacaatctacgaaactcgttgcaccagcgagccgatcttcatggtgaaaccttggaatccgtatcactttctcatcaaagaactgtctcttgattctcccttttatgaacctatgtataagttagtccgaagtttcttatgatgtaatgaaagaatctctgaatctccatcaccgacgaccctatgtaccccactgcaaaggccaactacaccacctctgcagccaattaccctcatttccattctcttcctccccttccgccggcggccaaacagaattaaaaatgacctccaactgcgcagccccctcagacacccaacgacgggcactctgcttctgcatatgctttacggccttgacaccgaccagaaggtccgtctgaaccgtccaagacggagccggcgctttgaagatattgcaattcgacactattgatatgcttcttgcagcagctgcaggtgcactatacaagggatgaatctttaacttcgtgaggcactgacccctaacctggtgggagcggatgtgtgtaaatatagtcttggccagatccttgtcgatagcggagttaatcattgtgtctctgatgtaccagataggcacctcgaggccggtagaaggcaggggttgagacttctcaaattccgttaggtcgcgcggtggaactggggaggggggttcgatttcgttggggtccacaagcggtgggcagttcaggtagagctcgagagttgttagagctgggaacagggcgagcgcggtgtatgcgggtgtttcgaggccgcgattgcgttggatggcgatgcacagggtctggagggaggggcaatgggctgcaaggggatggatttcctcgacggaacatattgggcctgtcacactctggccttttgcgcggagtcggcggagtgtctgatggttcaagtcttgggagccgacgttgagctttagttcaagtagcgttgggccgtgcttgcgaagggcagtagacaggagggctggtttgtagctacccaggaggcagaggtatgtgagcggggggagggagtcgaacattgcctctacagctgtgtagaaggataactcgtcgtcttgcggtgggaagagagcgagggtgagtctatttagctgctggaagggacggagaccggcaatagcgcgcagtacttgggtctcttcgatgcagccaacggtccacgattttaagcagctgtaatctactagcttatcccacttgaggaactgcccagccggcattagggtattcagcggccacgctagctgttcaagctttgcacgcagtggttccaccccaacccttccctcaacaaccaccgtctcgctgaagtcttccttcgggccggcctgaccacccgcgacaatctgtaatgcaagtctcttgacatgcggtgcacgaataatcatatcttcaagaactctatctgggtgctccctgaagttcctgcgctccggatgcgcgaaaagagtaacatgtgcggtgtgcagctgcggcgatagaacccaatcgtctgtctttcgatacatgtctcccacttgaggactcaagtagacagatgatcgacaatctggatgatactgcctgatggccttgtgaagctcgacagggccgccgttggacataagaagatcaatatcccgcaattgagggaccttgtgaatgaggtcaattacctcggcgctctggttcgttgaacaacccctaaatttgggaatgctttgacctcccaaattctctgtcttaagcgaagcccggaggccgctgtaggcacgaagcactggtgcgcgcggtgggccgctaattggataccatgggacgatgatactgagtcgctttatgtgtacgagaacacggctggcttctggctgccagtgaaacttatgagaggcatcatctttgagtggacgtataatgatatgctcgtacaagagcggcctggcaattctgttccattcttggtccaccagggagagtgcagccaagctcttcatacattcatcgcccatctgcagatatggtcagatatcaacaccattggagaaaaggtcgacgtacatatctcgcaatcagacatttgatctctgatggcagtcggtccatgatttggtagaaaggtttgatgttgaacagagagtaaaaaaagctagctcggggaaaatggctttcttttacacagagcttacctaataccacgtaactaacgtaatccacggccgttcggaacaccccaaaacaccatactaaatgcgataaatgaccacttcatatctcaacaatcatatcaatcaatgataatatacttaaatgatagaatctagagagtatttttagcccacttgcgaagtgtaggaagattactggaagtattaattaagatgtatgtattcaccttaaagtgacgccgtattttgtagtaaagcattgaaataaacgtccagactgtttgaaactaaggctttctatttcgcatgctaagaagagtctgtatggttgttgagatatgaagtgggggaccctctcctttactactggtatttaccgcctgttacatgtattgtttctgcttgcgttacgtaccgtttttggagtacaagattgtcagtttccatcaaatagtaatacacgctcctacacatctctgaaaggtgtcccttcgggtccgtcccggtgtctgctacgactagagtgatggtttgtggtttgttccattactgctgaatcgacccgtgtacctagagtgcacagcccagagcgttcccctcttcactagttacttagtctacttcctacctagcgcaaaacacgtctagagctacacccatggatagaactcctgctctgctccaccttcctccacgggtacaacccaacaacaccctaactatcagcgatataaaataacatatgataacagggcgccatccccgcgctatcatccatatccacatcttcatccgagtccgagtcctccacatccaactccggaatatagcactgctcctcattcgtccaaatccgcaccttcgaaattgtcttcaagcccgtcaccggagtcacgctctgatccgcccccagtgccgttttatgattaatgagaaaccaagcctgcgggttcccgtttggcgttcccaggagcgcctgccccgtctccgtgctcatgtcaaactcccagtaaaacacctcggccgcggacgcgtcattcgccgtatcgatgctgatcgcttcctcgatgatcgcccgcgtgttcaagttcaccacgttcatctggaacatgtacttgatggtgctagggtcggaggcgcgcgccgcccactcgatccacatcacatctgacagctgctgaatggcgggaagggagtcagaggagtcccacttgccatcgacttggagctcttccttcttaaagccgggggaccaggcgaggtccacgattatggcgttgttggcggtattgtaccagcactggtagttggcgcccgtggcctacttatttgattagtatgtttatctccctgtgggttactttccggcaggtcaagtagaatggaaaagtagaatggaaaaggtgcaagcgaatttaccgggtgcgtactatccaccgccaccgtgtgctcccagttcacaaccacattgttggatggggaaatccccagctcgttgagcattgtctgcccaacatactggacaaagttctcggcaagaccggtgtacgggttttggtcgattgtccagccgcaggccgtaagctggtctcgggtcagcgccgttgcaacaatgctgcgatcgaacttaatcagggctgtggcgtcggagtacccggttgcacatatgaggccgctgcctttattcttgcaggtgtcgtagtatgcggaggttctcttggcgagactcttcacaggcaatgagaagccagaactgaagcgttcgtgtctggggaaggcttctgcccaggtgctgctcacgaagagggcatttatgagcaggaagagggtggctagggagaggccatgtttaaagagggtcatggttgggggtgctcatgcgtgagctggggtaagattggtaaaagagtgtagattgtagtgagagaatgaaggaatacaaggaaagaaaagaacgaatgccagtgtgcgatggaaggagaaaatgtcgagatttgtctaggtatagggagatgacaaggcgtaataaagagtaagtccctctgctaccgtatcatttggcgatgcctgctcttccgagggctgcggcgttccttgtcataacttccctcgctagcaactgcagctgagcatcatttctccttcacttctgagcagcctcttacaagcgagtactttcatcgtaatttccggaccctatccactattacactagctcgacaggaacatgtctttggacaccaaacccttcatcacggccggagacacgatcaaaacggcaagagtgtacgaggcatgtacccaagtttggctttaggttccatttcttcatattccaaattctctttcgtcagttcatagtccaggatttttcttcttgcacctaaatccctcaacatccagggccccttacaaataccatacactagccaccgtattaccaagaccataaaatagttacaggccgccgggcggagccatcacttagagcgcaatgctccattgctccactaacgcaacctgcgcctgatttgtccagggagctgctatggccattacactagccaaaatataatgtattcttcatatcaaatatcgccaaacgccggtcaaagtgtcggctttccggcggtcccggcggccgagagaaggtaggaactattggatactttagtgcatttatggagtgggtctcagacatactagaaagggagcttggataaaaatgtacctgtagtaaagtaagatgactttgagatctcaccgacggtcaaataaatgttgaaaatccaacgcagttgtcagcttttgataaaccacgcttaatgagataattgaaatttgaagcctgaaatcctcaaatctttattaactctaatgaggattcgaagaaattccgtatcgagaaagaaaacaaaagaaaaaagtatagaatattttgatttgtcaaaaattgccgaatgcggcgctggaatttccacaggaaatgccgaacattggacaaacaatggtgactcggaattgggtactagtagcatttgttccgaggactggaaactcgaattaatgtatcagccactttgatcaccagctgcaagattttcagcgaggagttagtccgaacttgaaggtccttcatgttcaggtcaattcattaggtaacatttaccactggcattgggagtagattgttaacatcacatgaaagattatacatgaaatattcttgctacatatgtacttgacactacttaaattatgggcctcttattcacaagtgcgagatgacatgttcaaattgcagtcccccggacttttctatatctaacttaagaaaagttcacgtcactgcccagtgactccacagtatgtcattgcttaattcatgggtttcagggtggagacttcagtgtgggaatgaggacataggtagacgtaacatgatatgaaaggctcgttcgtcagagtgtgatcgacatcttcaatcacgagataccaatacagacataatatccaacccacagagagctgcaagtgtcaccgacagtagggttccaatcgtaaaactcatccagagtgataccagcatcgctggcaatagttgcacactcgtctccactgataaccagatggtacgcatcacagttgtccaccatgccactctcaatgggcgaaggagtggctgatggggcggaagaagaaccggaagtcactgttgtggtcacaaaggtagtggcacgagcagtggttactactgccgagctagaacttgcagccacgccaacacagacatagtcatcaacccagagagaggcgcaggtactgccaacggctggattccaggcatagaagttggtcagactaatatcatagtcgctagcgatggttgcacaatcatcaccactgacgactagataaaactcgtcgcaatcactcaccatgccagtttggataggagagggagttgaagggactgaagggattgaagtcaaggccaaagatggagttgcagtcgtagatgggatatagctcaaggctgcagctggtacgggtacagaaggcgccacaaggtagctcgagggcaggtaagtgccaacgacaaagttcacctgtacgcagtagtatagatcaggaagcatttcacagcttgagccaagatccattacaagcgggttctaggtaggaaagcattagtaaaagtacaagtcatggcatcaagagtgtcatttctttacccattcttcaaactgtgcggcggtaatctcgtaaagcacttcgactgcctgacaagtcgacccttcctgatacaagtaccataaactgcaatcctcgctactgccgggggcggcaacaccggccgggctaacaagatagcctgcagcctgcccgagggaaaggctaagggcagacagagcccaataaaaagatttcatggcgtacatggaagaacaaacttgagattcggaacttgaacttctaaggttgaacttgaattttcgggttgggattttggatacaagtttggaatagatagacatcggaatatatatgataccactctcgagattgaatagcttggacttagaactcaatttctccgcaacacccggggcctatgtgcaagaagactccaccacctccgaaattccaaattcccaccgttttcacgggaacagagatttctggtcagaagaccactccgatagtcctcctagcgatggtcggagccgggaggtggggattagattgccaggaccgtgacatctagaaaaatcatcttcgtatccacagaagccgctttccatagagtcttcaacgaaggatgttttgaccaaatctagaaacaagtgccgtatattcactggtcagcggatcctgccaagaaaattccttaagtcaattttcacgaggcttgtcaggcttgtcacaagcttgtctcccgccgtaggctagatgtgccgaaaattaattaatgagagcaagttatcttttcacgttaagcaaagtcttcgctacatggcccaatcacctacctgtgtatgaatctggattgttccgtggagtgccgacgctaagcattggtgtgtgctatgtggagaccctgctcaggtgggattggtgtgtccatgtcaaacggccccacccggacattgcttatccttagaacctcaactagcttgtttagtgcagcagaatatgtaaacactcacatgtgggtaggttgttcggtaatttttgaattcggccagattccgaaatcctactaatttactgcagggctcgccttcccttcccatctccactccgagttacagcctagtaattgagactatactggaaagggagtctttaaccacatggaggagcaggagttgagatgatttcaacgtaaaccaatcagaaaaatccctcatctggtcctgcgctttgccaaatcattttcactgaatttagtctgaatcctagcttgaaaccgggattttcaactaaccttttgtatgacggtggatacaccgcttgaattgtcagtttaggaacgtctctacgctgacatttggtcctgagtttcccttgtttactaaatggtcattcctcggaagtaaagactcttcactgttctccatcaacctacctccctttgcctgagagaaggctatcctctcatttgtgaccctcagtggtctcttcttttctttttcttgttggcagactacctttgtcaattggcttcattcttgactctcgactttcattcattcctttttttactttccatttcatcatgcgatgggccggcagtttggccagtttcctggcatggacacttgtctcccaggccgtgcattgtatgtgcacgaatgtgaatccagctgaggtttcatcgtctgttagtgcgtacctggcagcaaaccccattgccacgcgccaggcaacccagacagctgatgcagcgagtatgatggcatccatcattgccggtgacttcaagcccagactcttcgcggcgagcaggagtcgatgcccagtaagctgcagcagcagtggcctcagctctactgcctggtcagtataccacagcgtcagacggcttgatctgtgtaacaacaccatgctgcttgatttcaacatgttcaatgagctggatgatccaaacacgcataccagtattgcagcttgtaccgcggactttgatttctcttcttcagtcacaggaagctcccaagacagcgcttgctcctcactttctgtcagccagtctacaaatatatcttctttggagctagcctcatctggatcaacatcctccactggcgtgtcagacattattgatgcccttgagcaactccaaaatttcttcactgtttctggctccggatgcgatgacgcgattcagatcgcctactcaggtcaggcggcagtcggtgtttttgttggctctggtcttcacagccagggtgtcatctcatctatactcaagaaatttatgacccaaattgagacagatggcaccattgccgaggagactctcattcaactatgcaagggctccacagctagatactctctcggcgtgttcgccagtaccgagggagatctcgtttccgtccagaaggcgattcagtcctggagcaatggcagttgtataacttcaatggaggagtccactcggaactggcagagcctctcgttcacggttgcatcctcgaatcaaaacttatcgtctctcagcaactctacgtattcaaccggaaatgcaattctgcctggtgcgaaacgctcagcttctcacccacagcatgcctactcacattcttatcttcattatggtcgtgcggtgaaaactcaactgcaagcccgtgacgatagtgacgaatgcaccaccattcaagctatatcgggtgatgacccaacctctctcgccagtgagtgtggcatcacggttgctgaatttgacgagtataattcttcactcaacatgacagacctccaagctggacagcacgtctgttgcacgaacggaactatgcctgattacacgcccaagcctgattccgatgacaactgctattcgtacacagtccagactgatgatacctgcacagctctggctgcggcctacgacatcactgtcgccgagatcgaggactggaacaccggaagcaatggaacgtggggctggatgggctgctcggacctgctggttggcagtcatatttgcttaagcagtgggtggccgccaatgccatcgaccatttcaaatgctgtttgtggtcctcaagtcaacggcactgccaatgcaacccatggtaccgatttgagcaccctcaacgagtgtcctctcaatgcatgctgcgatatctggggccagtgtggtatcaccgcagaattctgtaccaaatccaactctactacaggtaacccgggaacagcagccaaagatcaaaacggatgtatctccaactgcggtactgatattattgtcagtgatgccccagctgaaatatattctatcgcttattttgaagcatttgaccaaacccgaccatgtcttaccatgtccgttgatcaaattaacaccaccttctattctcatgtccactttgcctttgcaaccctcactagtagctatgctatcaatgtcaccggcatagaggaccagctttctcttttctcaaacatgactggcatcaagcgcgtcttgtcgattggcggatggtccttctctactgatgcatctacttatatgatcttccgcgatgcagttacttctgccaatcgtgacaccttgatcactaatgttgtagatttcttggagaagtgggacctcgacggcgtggactttgactgggagtatcctgatgagccagatattgagggaattccagcaggaaccacagcagatagcaccaattactatatcacactggacctgctgaagacctccatgccaatagggaagacattgtccctcactgtgccagcctccttctggtaccttgagagattccctatcgaggcaatcagtaccgtggctgattacattgtttacatgacctatgacttgcatggccagtgggactatgacaatgcttactctgacgacggatgctcagctggcaactgtttacgatcccatgtcaatctgaccgaaaccctcagcgctctgtctatgatcaccaaagcgggagtttcttccaacaaggtggccgttggaacggctagctacgctcgctcttttgaaatgacggaggctggctgctggaccgacatgtgcacctataccggacccgattcgggcgcctggccaggtccctgtacggacaccgcgggatatatctcgaattatgagctcgagctggtgatagcagagaacccgtctgcagttcagtactgggacaacagctcgtatactaacattttggtcttcaacgagactcaatgggctggatacatgaacgataccaacaaggcagtgcgaaccaccttatacgagagcctgaacttcttgggaacatcagactgggccgttgatctgcaatcggaggatggcaacgaagagagtgccggctctggtgtcatttacatcagctcgattatcttcaatgagactgacccagaagtggctggttacccgcccttcacgatggtatggcctatctcctcggttgagcccatggttgtcaacttccctccgtatccatatgtttatattgaggggggctatgggaccacttcttggcactccgtcccctcaagaactgttgacggaatgagctacttccagtggtcgggaccagcctcgggcgtcccgaccacaacgtacactcttacccccagctacagtccctcgccactgacaatcatcggtaatgatggtgatgtgcccattgtggtgtatccgccccctatcgagtcacccttcactacaccgtacgctgtcgttgatggccagagttacatggttatgagcggcacagccacaatcggtgatacgaacgggctttctattatcacgggcattccctctccagccgccacgccccagacagtcactaaagtcatttacgttgaagacccagtcagcaccgccagcaccgccagcacagcggccaacaacacggtagtagttgtggtattgcccactgacgattccggctctggtacgaataccctgccacagacaacctccatatcgggcaccatcatatatacttggtcagagcagcagatcgatagcttggccaccattcccacgactactaccatcacgacaaccaatgtcaacgacaaaacaaccactatcgggatcgtacctgtcaacaccggtggcttctactggtcgccagtttctgttcctgatattccattgccaacagtgcctttccctgatttggcgccgattcccactctcccttgctttaccctctttgatatcttcacaattgattgcccaccgagcgatgacacgaaaagcaaaagctccaaaaagactgtcaaatacacaagtgcaaaggaatcgcccacttgctctcccagtacggccaaatcctgcggtgtactctgcacatcaaattgtagtccttcatcgacatctacttcgacaacgacttcttctaccacttgcagctccgaatcaacagttacagactactgggtctcatgtgactctacagcatgctcaaccacaagcaccgccacggtcaccgggtgtcaagtgacagctagcacgacgaccacgggtgtctactgtgcagtcacctctatcaccaacatttggtccactgatgatcaaggtgaaaacggcggtgaatactttacctccagcacacaaaccattcccgaggaagttgtcgcagccggaactacctatattgctggttccgatggggccgtcacactcggcaatggagatgtcattactgttcctaccagcgtcgctggcacaaccactgttacccttggcacagttgttgctacagttgacccctccgaagtgactgtcgttgccgtggttgtgactagtgaagtagtcgaatctacttccgcaagctctacgtccaagactgaatctacaacgtcaacgaccaccaagaagactaccagtactaccacaacagtctccataccaactgccactgagttttgtgcaaagtatgttattgaaaacgaagacacctcattggacaagtacggttctgagtacgatgaatttgtatttgttatgtggggtatccagtgggacggacttggatcagcggatgctgaatccgagattgagggcatcttggaggattgtggtatcactgcagatattcatgttgcagttgatactaccgaatggggcacagtagcgatgtggaataacggcgaaaacgacgttatcaccccatgtgtcaaactgaaaatcaaggcattgggtggtggtacaccttcttgtaaatggatttataagacttctgaggatgtgaactacagtgccaaggattctgctgaagctgagatgacttggatctataacaatcacaaatctgtgatttcggcgccatatcctctggcaacctgaacaaattgatatgcaatctgatcttacaatcaggacagtcagtcaactttctttccacaaggttctcttacggttgttcaaccttgaaatgcttctttttgaagatggaacctcattcacttgtacttacatttttcttttatcattttgaatccttggctcatagctggtccaagtagtctacacagttccaacattttctctctgtaaattacatctcgcttcagaatcgtgtgtacagattgcatagtgatttcaaattttaagtggctaactaagctgcagcaatgagatacatacatgtatcccccttcagaaaaagtcttactgggccccataagacaaattttcatcgaatctggaatgcatgaacactatggagtcagtctgttgcacaaacactttccaatggaaacgaaccaacggcttgtggactaccgaaacatttcggcaccgtggactgtcaatgacaaaaacgctgtggtgtccaaatatgaaggcttcattgtccctcgatcattcaggtttttcgacaaaaaattgacaccaatcgaatttgaattctcttcattcttccctcaaggaaactgcgaccttgagttctttgagcggctctcgtgtcttctccatgatcacaacttggaaaacgtacttggagttcgatgcctagacaaatttgatcctgaactatccgtggaggtcactgagggcaagaccaacatcatgatatcgcggggatctgttcagaactcagagcttattgaagcattctggattttcagtaccgacgatgaccaaagatgccattgcagagaatcctgctggaaagattccgagggaaagcatatcgaagaccatggatgctcttgaggcagtagaagatgtcaagtttcctttggcaagctagtctgaacaacctgtcatagatttcatccttccggacaatggagattacgtcattgacatttgctattcttcggaagaatgacaagatttgaaaacacccaactatctgtatttcacaaagaaaactccatgtttttcctggcatccaggtctgggttccgtagcatgctagtaaagtttccctgctttgtttccacaaccccaaccggttcaaaaccaaatttagagtatagctgaacaccatcgggagaggataaaacaaaagtatgaagctcatttttgtccacaatgtcgcagagcattttcaagagcgtagaaccaacacctttccgttgatgatcagggtccacagccatgaatgtgatcccttgagataggttaatgaggctttgaaaggtcttaattggttgcgagcttactacatatttcattgtcatgccatttttggaacactctttgcctctccgctctgagcagtttggagatgccaagccatgagggcacgtccaaagaagggggggtccagctatcatgatgtcccatcttcctgctctgcctttcttcggagttgattatcgagtcatcttggatgaaattctgaccattaatcatcccctttgagaagacacctgagcaggtggtccaacctatcaatccgacaggtaggccatctgctccgcatgccttgtaaagcgattcgttctctcgacaaattgcttcatggattccatcaattgcccatttgatttcatcttcattgcaatcccactgctgttctgttgagagtgggaacataaagcgacggagcggactatctaggtgcgcaggaaattcgacccgtcgtacgagcacactcacatcctcacttttgacaggcgataaggagaatgccatttgttgctgacttgcaagaggaagttttgatctttgctggatgtcttgacgtacaagggagaacaactcacgatccacagatgagtcacatgcctcttactcagccaatagggcaaaatttcggaacgtggtcgttacagtacggactagtacgggcatagccaattgagtacttgagagtgtgaattgttatatactgctgaagatgcacaataaataagggggttgagcttagtaatggaggtgctgaatattccccgggcgcactagtaacatggcgaccctcttttgtcgacacaaaatccttgctagcaagcacagggaaataatttttgccattagtagctctcaaaaaacgtttgaggcaactaagcaatatgtagtaagcacctaggagtagatcgcaagttcccaggaatattctagcctccgagaaatactaacaagccccagccactttttcaatagcatcatgccaagccctaaagatcgctttgaggccctcgtgtttaaagtgaagataatatttgccaagcggatacacaatctagataacgttcaggaggtttcagatacgctatgtaggctcggccccgtcattccatcatttacatttcacccgcatcctttgacaaccctgtaacgcgggcacacgtcaacaggccctggacgaagcggactcagtacatgggtacatccaggatctctacggtgtacgcggcagagctcagagggctcgttttggcgctacagatagcactcgacacaccgccaacgtataccctgccagataaatgcgtcgccatattcacggacaaccaagccgctatccaagccattcggaaccccaagcacccatcgggacaatacattttggtcgaggctattcaagtactcgaacagcttcgagaacaaggatggcaaatacagttccgatggattccagcacatgtcggcgtgccaggtaacgaggcaccctaccaagcagcgaaagcggccaccggaagcaatccaagcacgggagcgagcactgagcgaccgccagaagcggactctctgcggacactcacggcaaccaccaagtcaatcatccgtcggttgatgagagatgagtgggatacggcctgggagaatgccaagcacgggagagagctctttaggctcgaggtgaggccagggaaggcgatactcgacacgcacattggcatatacagagcgatcagctccgccatcacacagatgcgcacgggcaagattggcctacgtgcatacctccacgccatcaacaaggccgactccgaccaatgcgaatgcggccacgggccgcaaaccgtacggcacgtcctgcttgagtgccgggactgggcagacgaacgacatcaaatgtgggcaggcagggctccatgcagacatcaaacgcattctctgtagcccgtcaatggcagtataagcagcaaagatgctcttgaggactgggctgctgggacaattccgagcagtgccatccacggtactaaaatatatatagcgaagaagagtgatttaaattgtttatcttacttgtttgaccagacaagcctgtacaagcttgctgctcattcgatttatacaggttcgcagaagtataacaagctaagaaaaacacgttagcaggatcgtgagcgattggtagctcagggactcgtgaggttatacggacctgccatgttagcctaccgccttcagtgagtgcaatagtgatccctgtacagagagtggggtctattgccaatgggaggcgctatgtaaccgcttgtctcttgtcgccgatccgttcaagtagtcatatgcatatttcgtatgtaaagctgtaagccatgtcaccgaaggtgcctgaaatcccgtcccaattcctccactgacgtagctgctggtctagattgtaagttggtaaaagcaagaaattatatgcattagttttacatgatgtgtaaattgctttaatgaatgaggccatataagttagttactctttcgatctatgtaggttcgcagaaggaccgcaaataaggagataggccattgtgtgcgattggtaggcccaggctgcgtgagactgcacggtcctgtattattgacctactgtgcgaaccaatcaggtctgtctgccgtacgctgctcattttccgtcgccttgggtgatctggttgacaagaagttagtagacgggttgctaaaatatacgctgtcgggcttatgagcgtaagtcttagacagtcagggggcttcacaagcactagagagaagttgggaatcccctagtaagcagggtaaagaaaaaattaactggcttatattactgacatgaatcgttcgcgtataaatgaagtgggattaaactaaattaagtttagttttgcagcttattgtgagtgacttcctctagtagtagcgcttattggctcagtaagtatcagcctcgtctacttttaggtatgcagccgcctatcgacgtgttaatttaataataacgacgctctcgacctaatgatatataacagctttgaccccgcttgtcatataggagataagctgatctgtaacgtccactagggtaatccttactaatctagccattcgaattttaacctaacgggttagctgtaggtagcgtagccgctggcataagaaaaatttggaaagtcaccatgtgggaaaagtttatacagcccttacgctaatgcatagattctagatattcaagagccagtcaattactgattcatgaggtatttaagaataggtccagaggagcctcaatgctaacgcgtcaagggctataattgtctagcgtttatcatctgtgctctgggccacttagatctgtcaggcttaagaggggatcataggcatctcaatctcgacagagcgatgccacctaacccttccgtaaatagtaagcgagtatggagttcacccactataagtactccaaagccccaacctgtgaaatgatttcccagtacattcatgattatcttattgaccaagcagtcttcaatttacaacccagattcgacctaaaaactcacagtcaaagcttcaaaatggctactaggtatctccaacggttgagagatacaagaagtatccaagaagttccgataggaggggtacaattcgttacttttcaacaaaggcatgcaattggaacttctaggcttagatcttattccgctgttatcatagcctcgagatacaatgcaatactcgtatacataccaccacttccttctgtaacacaagttcctggtacaggtgacaacaatactcggttcataataaaccaagtacaagctcactacaataccaatcgaaattatttcccctcctcggaaacatgagtcatttacactgtctatcaaggccaagtggcattgccaagtcaagtgcaaattatgatgagttatcttcaggcaataggccttactccaactattaaatactatatagtacccgtgaatccgctcattccgggccagggaacggttgtggtcatgagtagagcgaacgggccttcgatatatcataatgatgctctgatttaggctgaatatactcttgagacgaaatattcaagatcattgtaatgggttgctgatcggcaatcaagttcataggagttttatcaagtatttggctctttttactataactacctctgattaccaaattcaaaatatataccgtacttcctagttttttttcagcctcgtgtagcatacgataagcagtgtagccgaacatagtgaagccatatgtattctgcagctcattctttagtaaatcatccccgcaaatatcctgaaacggatagccccacttcttattccttttgtattagctagaactaaataacaattgcgcgtgacttgttacatcgaccatgtaatacgggtatttaagcgatcgggtcgccctacttttccttaaatcctactggtaacctataaaatactcaaattctcttcatcctatatggatatccggcttcttctaaaagcagaacttactaaccatactaggttctcaattccttgtagaactgcagtaaacataattaaaaaattgcgttcaacgtgtaccgataataacttccaaggattttagaatgcaatgtactctaatagtctcgatatagtggaccttcatgatataataatagaagtaattcatctgggccgagtcgaattcgtttcactacttctctctcatggcttcccgataaagccttcttttactcgagaggcaatagtattcaaggtaaagcgcgttctcgaatgttttcttgaagctgggtaggacataaatgatccagttgatattctaatacctcctgtgctttggtaagttggctccactattcgaaaagccattccaataacaagagatctgttttcatagctatgcggtaacagacgtcgagatgaccagatggtttctagaacatggtacaaacccaaatacgtcgtgcgaggtagactgcaccccattgtcctatactattcgaaatgctcgtctaagtgtcatcaaattaatgctggaccatagaggagatgtgcgaaaaggacaacttcttcagtatgccgtttgtcgggacgaggggctggaagatataatctccctgctcgtcgaaagaggcgcgcctttaaatgcgacaatgtataaggatggccagactttgatacatttctatcccataagcctagggactgcgcttcacacggcaacagaacagggaaagatgaatgcaatccgccttttgaagcatctcggagcagacactgaggtgaaggacgcgaatggcgatactactttagaataggcacaaaaatggaataaaccagatatagtaaggcttttaagagacttggaagatcattcttaagcatattcgaaattgaagataggaataaattgagactagttacagcactatgatcaattttctagtttatccatattatcatttctattcacagtcctagatagggtgcctatcgtctatatcttgaagtcatcacccattcacatactaccagcggtaggaagaccaataatgccaaacgtaatctacgcttagtcccattttgagtaatataaaacgccttacgcggctcctgcagttgtatagaaattcagtcctccaacgcgtccttatacgacgaagagtcgtggaaggtaaatgatggcgttcatataaagcttccctggatacttgtattaaaatagatggccttagaggatgttgtggatgttgtatacagcggaaggtagacaggcgcaaacaacccccctaacgaccctaatagttcagcctctctcattcgtgtccctttggtctcccagatcgagagctggccttatagcgtaatttagttgaatagtggacttgaagggatgaaatatttcgacctaggaagtgagtcgtaatcttagaccatgacattgcctctttttccttcagccgcactagcagcgcattcttgtccgatgtgtacgtactgtgtttccctaggatgaccgccgtatagggtcgagacagcatcaggctagggtcgggtacaaaagtaaagaaatataccggcttcagatcagaattagattcgaccataaggagagcactcccacgtataccttggatagcaccaggacaataacatgaaacgggagtggaagagtccgaagggtcggaaagtagcctgattgaaggtttccgtttcttcctcttttaacacggctgttctgtgtcatagaaggtagtattcccatcttggtcgttgccagtgcctcgacttgagcggagttgtcaggaccccagtactaagaaggctgatacctgaggtattgtacctgttagggtgtgtagggaactgtagactacgtaggagctatatgtgctgcctatatagcccccttcttannnnnnnnnnnnnnnnnnnnnnnnnnnnnnnnnnnnnnnnnnnnnnnnnnnnnnnnnnnnnnnnnnnnnnnnnnnnnnnnnnnnnnnnnnnnnnnnnnnnnnnnnnnnnnnnnnnnnnnnnnnnnnnnnnnnnnnnnnnnnnnnnnnnnnnnnnnnnnnnnnnnnnnnnnnnnnnnnnnnnnnnnnnnnnnnnnnnnnnnnnnnnnnnnnnnnnnnnnnnnnnnnnnnnnnnnnnnnnnnnnnnnnnnnnnnnnnnnnnnnnnnnnnnnnnnnnnnnnnnnnnnnnnnnnnnnnnnnnnnnnnnnnnnnnnnnnnnnnnnnnnnnnnnnnnnnnnnnnnnnnnnnnnnnnnnnnnnnnnnnnnnnnnnnnnnnnnnnnnnnnnnnnnnnnnnnnnnnnnnnnnnnnnnnnnnnnnnnnnnnnnnnnnnnnnnnnnnnnnnnnnnnnnnnnnnnnnnnnnnnnnnnnnnnnnnnnnnnnnnnnnnnnnnnnnnnnnnnnnnnnnnnnnnnnnnnnnnnnnnnnnnnnnnnnnnnnnnnnnnnnnnnnnnnnnnnnnnnnnnnnnnnnnnnnnnnnnnnnnnnnnnnnnnnnnnnnnnnnnnnnnnnnnnnnnnnnnnnnnnnnnnnnnnnnnnnnnnnnnnnnnnnnnnnnnnnnnnnnnnnnnnnnnnnnnnnnnnnnnnnnnnnnnnnnnnnnnnnnnnnnnnnnnnnnnnnnnnnnnnnnnnnnnnnnnnnnnnnnnnnnnnnnnnnnnnnnnnnnnnnnnnnnnnnnnnnnnnnnnnnnnnnnnnnnnnnnnnnnnnnnnnnnnnnnnnnnnnnnnnnnnnnnnnnnnnnnnnnnnnnnnnnnnnnnnnnnnnnnnnnnnnnnnnnnnnnnnnnnnnnnnnnnnnnnnnnnnnnnnnnnnnnnnnnnnnnnnnnnnnnnnnnnnnnnnnnnnnnnnnnnnnnnnnnnnnnnnnnnnnnnnnnnnnnnnnnnnnnnnnnnnnnnnnnnnnnnnnnnnnnnnnnnnnnnnnnnnnnnnnnnnnnnnnnnnnnnnnnnnnnnnnnnnnnnnnnnnnnnnnnnnnnnnnnnnnnnnnnnnnnnnnnnnnnnnnnnnnnnnnnnnnnnnnnnnnnnnnnnnnnnnnnnnnnnnnnnnnnnnnnnnnnnnnnnnnnnnnnnnnnnnnnnnnnnnnnnnnnnnnnnnnnnnnnnnnnnnnnnnnnnnnnnnnnnnnnnnnnnnnnnnnnnnnnnnnnnnnnnnnnnnnnnnnnnnnnnnnnnnnnnnnnnnnnnnnnnnnnnnnnnnnnnnnnnnnnnnnnnnnnnnnnnnnnnnnnnnnnnnnnnnnnnnnnnnnnnnnnnnnnnnnnnnnnnnnnnnnnnnnnnnnnnnnnnnnnnnnnnnnnnnnnnnnnnnnnnnnnnnnnnnnnnnnnnnnnnnnnnnnnnnnnnnnnnnnnnnnnnnnnnnnnnnnnnnnnnnnnnnnnnnnnnnnnnnnnnnnnnnnnnnnnnnnnnnnnnnnnnnnnnnnnnnnnnnnnnnnnnnnnnnnnnnnnnnnnnnnnnnnnnnnnnnnnnnnnnnnnnnnnnnnnnnnnnnnnnnnnnnnnnnnnnnnnnnnnnnnnnnnnnnnnnnnnnnnnnnnnnnnnnnnnnnnnnnnnnnnnnnnnnnnnnnnnnnnnnnnnnnnnnnnnnnnnnnnnnnnnnnnnnnnnnnnnnnnnnnnnnnnnnnnnnnnnnnnnnnnnnnnnnnnnnnnnnnnnnnnnnnnnnnnnnnnnnnnnnnnnnnnnnnnnnnnnnnnnnnnnnnnnnnnnnnnnnnnnnnnnnnnnnnnnnnnnnnnnnnnnnnnnnnnnnnnnnnnnnnnnnnnnnnnnnnnnnnnnnnnnnnnnnnnnnnnnnnnnnnnnnnnnnnnnnnnnnnnnnnnnnnnnnnnnnnnnnnnnnnnnnnnnnnnnnnnnnnnnnnnnnnnnnnnnnnnnnnnnnnnnnnnnnnnnnnnnnnnnnnnnnnnnnnnnnnnnnnnnnnnnnnnnnnnnnnnnnnnnnnnnnnnnnnnnnnnnnnnnnnnnnnnnnnnnnnnnnnnnnnnnnnnnnnnnnnnnnnnnnnnnnnnnnnnnnnnnnnnnnnnnnnnnnnnnnnnnnnnnnnnnnnnnnnnnnnnnnnnnnnnnnnnnnnnnnnnnnnnnnnnnnnnnnnnnnnnnnnnnnnnnnnnnnnnnnnnnnnnnnnnnnnnnnnnnnnnnnnnnnnnnnnnnnnnnnnnnnnnnnnnnnnnnnnnnnnnnnnnnnnnnnnnnnnnnnnnnnnnnnnnnnnnnnnnnnnnnnnnnnnnnnnnnnnnnnnnnnnnnnnnnnnnnnnnnnnnnnnnnnnnnnnnnnnnnnnnnnnnnnnnnnnnnnnnnnnnnnnnnnnnnnnnnnnnnnnnnnnnnnnnnnnnnnnnnnnnnnnnnnnnnnnnnnnnnnnnnnnnnnnnnnnnnnnnnnnnnnnnnnnnnnnnnnnnnnnnnnnnnnnnnnnnnnnnnnnnnnnnnnnnnnnnnnnnnnnnnnnnnnnnnnnnnnnnnnnnnnnnnnnnnnnnnnnnnnnnnnnnnnnnnnnnnnnnnnnnnnnnnnnnnnnnnnnnnnnnnnnnnnnnnnnnnnnnnnnnnnnnnnnnnnnnnnnnnnnnnnnnnnnnnnnnnnnnnnnnnnnnnnnnnnnnnnnnnnnnnnnnnnnnnnnnnnnnnnnnnnnnnnnnnnnnnnnnnnnnnnnnnnnnnnnnnnnnnnnnnnnnnnnnnnnnnnnnnnnnnnnnnnnnnnnnnnnnnnnnnnnnnnnnnnnnnnnnnnnnnnnnnnnnnnnnnnnnnnnnnnnnnnnnnnnnnnnnnnnnnnnnnnnnnnnnnnnnnnnnnnnnnnnnnnnnnnnnnnnnnnnnnnnnnnnnnnnnnnnnnnnnnnnnnnnnnnnnnnnnnnnnnnnnnnnnnnnnnnnnnnnnnnnnnnnnnnnnnnnnnnnnnnnnnnnnnnnnnnnnnnnnnnnnnnnnnnnnnnnnnnnnnnnnnnnnnnnnnnnnnnnnnnnnnnnnnnnnnnnnnnnnnnnnnnnnnnnnnnnnnnnnnnnnnnnnnnnnnnnnnnnnnnnnnnnnnnnnnnnnnnnnnnnnnnnnnnnnnnnnnnnnnnnnnnnnnnnnnnnnnnnnnnnnnnnnnnnnnnnnnnnnnnnnnnnnnnnnnnnnnnnnnnnnnnnnnnnnnnnnnnnnnnnnnnnnnnnnnnnnnnnnnnnnnnnnnnnnnnnnnnnnnnnnnnnnnnnnnnnnnnnnnnnnnnnnnnnnnnnnnnnnnnnnnnnnnnnnnnnnnnnnnnnnnnnnnnnnnnnnnnnnnnnnnnnnnnnnnnnnnnnnnnnnnnnnnnnnnnnnnnnnnnnnnnnnnnnnnnnnnnnnnnnnnnnnnnnnnnnnnnnnnnnnnnnnnnnnnnnnnnnnnnnnnnnnnnnnnnnnnnnnnnnnnnnnnnnnnnnnnnnnnnnnnnnnnnnnnnnnnnnnnnnnnnnnnnnnnnnnnnnnnnnnnnnnnnnnnnnnnnnnnnnnnnnnnnnnnnnnnnnnnnnnnnnnnnnnnnnnnnnnnnnnnnnnnnnnnnnnnnnnnnnnnnnnnnnnnnnnnnnnnnnnnnnnnnnnnnnnnnnnnnnnnnnnnnnnnnnnnnnnnnnnnnnnnnnnnnnnnnnnnnnnnnnnnnnnnnnnnnnnnnnnnnnnnnnnnnnnnnnnnnnnnnnnnnnnnnnnnnnnnnnnnnnnnnnnnnnnnnnnnnnnnnnnnnnnnnnnnnnnnnnnnnnnnnnnnnnnnnnnnnnnnnnnnnnnnnnnnnnnnnnnnnnnnnnnnnnnnnnnnnnnnnnnnnnnnnnnnnnnnnnnnnnnnnnnnnnnnnnnnnnnnnnnnnnnnnnnnnnnnnnnnnnnnnnnnnnnnnnnnnnnnnnnnnnnnnnnnnnnnnnnnnnnnnnnnnnnnnnnnnnnnnnnnnnnnnnnnnnnnnnnnnnnnnnnnnnnnnnnnnnnnnnnnnnnnnnnnnnnnnnnnnnnnnnnnnnnnnnnnnnnnnnnnnnnnnnnnnnnnnnnnnnnnnnnnnnnnnnnnnnnnnnnnnnnnnnnnnnnnnnnnnnnnnnnnnnnnnnnnnnnnnnnnnnnnnnnnnnnnnnnnnnnnnnnnnnnnnnnnnnnnnnnnnnnnnnnnnnnnnnnnnnnnnnnnnnnnnnnnnnnnnnnnnnnnnnnnnnnnnnnnnnnnnnnnnnnnnnnnnnnnnnnnnnnnnnnnnnnnnnnnnnnnnnnnnnnnnnnnnnnnnnnnnnnnnnnnnnnnnnnnnnnnnnnnnnnnnnnnnnnnnnnnnnnnnnnnnnnnnnnnnnnnnnnnnnnnnnnnnnnnnnnnnnnnnnnnnnnnnnnnnnnnnnnnnnnnnnnnnnnnnnnnnnnnnnnnnnnnnnnnnnnnnnnnnnnnnnnnnnnnnnnnnnnnnnnnnnnnnnnnnnnnnnnnnnnnnnnnnnnnnnnnnnnnnnnnnnnnnnnnnnnnnnnnnnnnnnnnnnnnnnnnnnnnnnnnnnnnnnnnnnnnnnnnnnnnnnnnnnnnnnnnnnnnnnnnnnnnnnnnnnnnnnnnnnnnnnnnnnnnnnnnnnnnnnnnnnnnnnnnnnnnnnnnnnnnnnnnnnnnnnnnnnnnnnnnnnnnnnnnnnnnnnnnnnnnnnnnnnnnnnnnnnnnnnnnnnnnnnnnnnnnnnnnnnnnnnnnnnnnnnnnnnnnnnnnnnnnnnnnnnnnnnnnnnnnnnnnnnnnnnnnnnnnnnnnnnnnnnnnnnnnnnnnnnnnnnnnnnnnnnnnnnnnnnnnnnnnnnnnnnnnnnnnnnnnnnnnnnnnnnnnnnnnnnnnnnnnnnnnnnnnnnnnnnnnnnnnnnnnnnnnnnnnnnnnnnnnnnnnnnnnnnnnnnnnnnnnnnnnnnnnnnnnnnnnnnnnnnnnnnnnnnnnnnnnnnnnnnnnnnnnnnnnnnnnnnnnnnnnnnnnnnnnnnnnnnnnnnnnnnnnnnnnnnnnnnnnnnnnnnnnnnnnnnnnnnnnnnnnnnnnnnnnnnnnnnnnnnnnnnnnnnnnnnnnnnnnnnnnnnnnnnnnnnnnnnnnnnnnnnnnnnnnnnnnnnnnnnnnnnnnnnnnnnnnnnnnnnnnnnnnnnnnnnnnnnnnnnnnnnnnnnnnnnnnnnnnnnnnnnnnnnnnnnnnnnnnnnnnnnnnnnnnnnnnnnnnnnnnnnnnnnnnnnnnnnnnnnnnnnnnnnnnnnnnnnnnnnnnnnnnnnnnnnnnnnnnnnnnnnnnnnnnnnnnnnnnnnnnnnnnnnnnnnnnnnnnnnnnnnnnnnnnnnnnnnnnnnnnnnnnnnnnnnnnnnnnnnnnnnnnnnnnnnnnnnnnnnnnnnnnnnnnnnnnnnnnnnnnnnnnnnnnnnnnnnnnnnnnnnnnnnnnnnnnnnnnnnnnnnnnnnnnnnnnnnnnnnnnnnnnnnnnnnnnnnnnnnnnnnnnnnnnnnnnnnnnnnnnnnnnnnnnnnnnnnnnnnnnnnnnnnnnnnnnnnnnnnnnnnnnnnnnnnnnnnnnnnnnnnnnnnnnnnnnnnnnnnnnnnnnnnnnnnnnnnnnnnnnnnnnnnnnnnnnnnnnnnnnnnnnnnnnnnnnnnnnnnnnnnnnnnnnnnnnnnnnnnnnnnnnnnnnnnnnnnnnnnnnnnnnnnnnnnnnnnnnnnnnnnnnnnnnnnnnnnnnnnnnnnnnnnnnnnnnnnnnnnnnnnnnnnnnnnnnnnnnnnnnnnnnnnnnnnnnnnnnnnnnnnnnnnnnnnnnnnnnnnnnnnnnnnnnnnnnnnnnnnnnnnnnnnnnnnnnnnnnnnnnnnnnnnnnnnnnnnnnnnnnnnnnnnnnnnnnnnnnnnnnnnnnnnnnnnnnnnnnnnnnnnnnnnnnnnnnnnnnnnnnnnnnnnnnnnnnnnnnnnnnnnnnnnnnnnnnnnnnnnnnnnnnnnnnnnnnnnnnnnnnnnnnnnnnnnnnnnnnnnnnnnnnnnnnnnnnnnnnnnnnnnnnnnnnnnnnnnnnnnnnnnnnnnnnnnnnnnnnnnnnnnnnnnnnnnnnnnnnnnnnnnnnnnnnnnnnnnnnnnnnnnnnnnnnnnnnnnnnnnnnnnnnnnnnnnnnnnnnnnnnnnnnnnnnnnnnnnnnnnnnnnnnnnnnnnnnnnnnnnnnnnnnnnnnnnnnnnnnnnnnnnnnnnnnnnnnnnnnnnnnnnnnnnnnnnnnnnnnnnnnnnnnnnnnnnnnnnnnnnnnnnnnnnnnnnnnnnnnnnnnnnnnnnnnnnnnnnnnnnnnnnnnnnnnnnnnnnnnnnnnnnnnnnnnnnnnnnnnnnnnnnnnnnnnnnnnnnnnnnnnnnnnnnnnnnnnnnnnnnnnnnnnnnnnnnnnnnnnnnnnnnnnnnnnnnnnnnnnnnnnnnnnnnnnnnnnnnnnnnnnnnnnnnnnnnnnnnnnnnnnnnnnnnnnnnnnnnnnnnnnnnnnnnnnnnnnnnnnnnnnnnnnnnnnnnnnnnnnnnnnnnnnnnnnnnnnnnnnnnnnnnnnnnnnnnnnnnnnnnnnnnnnnnnnnnnnnnnnnnnnnnnnnnnnnnnnnnnnnnnnnnnnnnnnnnnnnnnnnnnnnnnnnnnnnnnnnnnnnnnnnnnnnnnnnnnnnnnnnnnnnnnnnnnnnnnnnnnnnnnnnnnnnnnnnnnnnnnnnnnnnnnnnnnnnnnnnnnnnnnnnnnnnnnnnnnnnnnnnnnnnnnnnnnnnnnnnnnnnnnnnnnnnnnnnnnnnnnnnnnnnnnnnnnnnnnnnnnnnnnnnnnnnnnnnnnnnnnnnnnnnnnnnnnnnnnnnnnnnnnnnnnnnnnnnnnnnnnnnnnnnnnnnnnnnnnnnnnnnnnnnnnnnnnnnnnnnnnnnnnnnnnnnnnnnnnnnnnnnnnnnnnnnnnnnnnnnnnnnnnnnnnnnnnnnnnnnnnnnnnnnnnnnnnnnnnnnnnnnnnnnnnnnnnnnnnnnnnnnnnnnnnnnnnnnnnnnnnnnnnnnnnnnnnnnnnnnnnnnnnnnnnnnnnnnnnnnnnnnnnnnnnnnnnnnnnnnnnnnnnnnnnnnnnnnnnnnnnnnnnnnnnnnnnnnnnnnnnnnnnnnnnnnnnnnnnnnnnnnnnnnnnnnnnnnnnnnnnnnnnnnnnnnnnnnnnnnnnnnnnnnnnnnnnnnnnnnnnnnnnnnnnnnnnnnnnnnnnnnnnnnnnnnnnnnnnnnnnnnnnnnnnnnnnnnnnnnnnnnnnnnnnnnnnnnnnnnnnnnnnnnnnnnnnnnnnnnnnnnnnnnnnnnnnnnnnnnnnnnnnnnnnnnnnnnnnnnnnnnnnnnnnnnnnnnnnnnnnnnnnnnnnnnnnnnnnnnnnnnnnnnnnnnnnnnnnnnnnnnnnnnnnnnnnnnnnnnnnnnnnnnnnnnnnnnnnnnnnnnnnnnnnnnnnnnnnnnnnnnnnnnnnnnnnnnnnnnnnnnnnnnnnnnnnnnnnnnnnnnnnnnnnnnnnnnnnnnnnnnnnnnnnnnnnnnnnnnnnnnnnnnnnnnnnnnnnnnnnnnnnnnnnnnnnnnnnnnnnnnnnnnnnnnnnnnnnnnnnnnnnnnnnnnnnnnnnnnnnnnnnnnnnnnnnnnnnnnnnnnnnnnnnnnnnnnnnnnnnnnnnnnnnnnnnnnnnnnnnnnnnnnnnnnnnnnnnnnnnnnnnnnnnnnnnnnnnnnnnnnnnnnnnnnnnnnnnnnnnnnnnnnnnnnnnnnnnnnnnnnnnnnnnnnnnnnnnnnnnnnnnnnnnnnnnnnnnnnnnnnnnnnnnnnnnnnnnnnnnnnnnnnnnnnnnnnnnnnnnnnnnnnnnnnnnnnnnnnnnnnnnnnnnnnnnnnnnnnnnnnnnnnnnnnnnnnnnnnnnnnnnnnnnnnnnnnnnnnnnnnnnnnnnnnnnnnnnnnnnnnnnnnnnnnnnnnnnnnnnnnnnnnnnnnnnnnnnnnnnnnnnnnnnnnnnnnnnnnnnnnnnnnnnnnnnnnnnnnnnnnnnnnnnnnnnnnnnnnnnnnnnnnnnnnnnnnnnnnnnnnnnnnnnnnnnnnnnnnnnnnnnnnnnnnnnnnnnnnnnnnnnnnnnnnnnnnnnnnnnnnnnnnnnnnnnnnnnnnnnnnnnnnnnnnnnnnnnnnnnnnnnnnnnnnnnnnnnnnnnnnnnnnnnnnnnnnnnnnnnnnnnnnnnnnnnnnnnnnnnnnnnnnnnnnnnnnnnnnnnnnnnnnnnnnnnnnnnnnnnnnnnnnnnnnnnnnnnnnnnnnnnnnnnnnnnnnnnnnnnnnnnnnnnnnnnnnnnnnnnnnnnnnnnnnnnnnnnnnnnnnnnnnnnnnnnnnnnnnnnnnnnnnnnnnnnnnnnnnnnnnnnnnnnnnnnnnnnnnnnnnnnnnnnnnnnnnnnnnnnnnnnnnnnnnnnnnnnnnnnnnnnnnnnnnnnnnnnnnnnnnnnnnnnnnnnnnnnnnnnnnnnnnnnnnnnnnnnnnnnnnnnnnnnnnnnnnnnnnnnnnnnnnnnnnnnnnnnnnnnnnnnnnnnnnnnnnnnnnnnnnnnnnnnnnnnnnnnnnnnnnnnnnnnnnnnnnnnnnnnnnnnnnnnnnnnnnnnnnnnnnnnnnnnnnnnnnnnnnnnnnnnnnnnnnnnnnnnnnnnnnnnnnnnnnnnnnnnnnnnnnnnnnnnnnnnnnnnnnnnnnnnnnnnnnnnnnnnnnnnnnnnnnnnnnnnnnnnnnnnnnnnnnnnnnnnnnnnnnnnnnnnnnnnnnnnnnnnnnnnnnnnnnnnnnnnnnnnnnnnnnnnnnnnnnnnnnnnnnnnnnnnnnnnnnnnnnnnnnnnnnnnnnnnnnnnnnnnnnnnnnnnnnnnnnnnnnnnnnnnnnnnnnnnnnnnnnnnnnnnnnnnnnnnnnnnnnnnnnnnnnnnnnnnnnnnnnnnnnnnnnnnnnnnnnnnnnnnnnnnnnnnnnnnnnnnnnnnnnnnnnnnnnnnnnnnnnnnnnnnnnnnnnnnnnnnnnnnnnnnnnnnnnnnnnnnnnnnnnnnnnnnnnnnnnnnnnnnnnnnnnnnnnnnnnnnnnnnnnnnnnnnnnnnnnnnnnnnnnnnnnnnnnnnnnnnnnnnnnnnnnnnnnnnnnnnnnnnnnnnnnnnnnnnnnnnnnnnnnnnnnnnnnnnnnnnnnnnnnnnnnnnnnnnnnnnnnnnnnnnnnnnnnnnnnnnnnnnnnnnnnnnnnnnnnnnnnnnnnnnnnnnnnnnnnnnnnnnnnnnnnnnnnnnnnnnnnnnnnnnnnnnnnnnnnnnnnnnnnnnnnnnnnnnnnnnnnnnnnnnnnnnnnnnnnnnnnnnnnnnnnnnnnnnnnnnnnnnnnnnnnnnnnnnnnnnnnnnnnnnnnnnnnnnnnnnnnnnnnnnnnnnnnnnnnnnnnnnnnnnnnnnnnnnnnnnnnnnnnnnnnnnnnnnnnnnnnnnnnnnnnnnnnnnnnnnnnnnnnnnnnnnnnnnnnnnnnnnnnnnnnnnnnnnnnnnnnnnnnnnnnnnnnnnnnnnnnnnnnnnnnnnnnnnnnnnnnnnnnnnnnnnnnnnnnnnnnnnnnnnnnnnnnnnnnnnnnnnnnnnnnnnnnnnnnnnnnnnnnnnnnnnnnnnnnnnnnnnnnnnnnnnnnnnnnnnnnnnnnnnnnnnnnnnnnnnnnnnnnnnnnnnnnnnnnnnnnnnnnnnnnnnnnnnnnnnnnnnnnnnnnnnnnnnnnnnnnnnnnnnnnnnnnnnnnnnnnnnnnnnnnnnnnnnnnnnnnnnnnnnnnnnnnnnnnnnnnnnnnnnnnnnnnnnnnnnnnnnnnnnnnnnnnnnnnnnnnnnnnnnnnnnnnnnnnnnnnnnnnnnnnnnnnnnnnnnnnnnnnnnnnnnnnnnnnnnnnnnnnnnnnnnnnnnnnnnnnnnnnnnnnnnnnnnnnnnnnnnnnnnnnnnnnnnnnnnnnnnnnnnnnnnnnnnnnnnnnnnnnnnnnnnnnnnnnnnnnnnnnnnnnnnnnnnnnnnnnnnnnnnnnnnnnnnnnnnnnnnnnnnnnnnnnnnnnnnnnnnnnnnnnnnnnnnnnnnnnnnnnnnnnnnnnnnnnnnnnnnnnnnnnnnnnnnnnnnnnnnnnnnnnnnnnnnnnnnnnnnnnnnnnnnnnnnnnnnnnnnnnnnnnnnnnnnnnnnnnnnnnnnnnnnnnnnnnnnnnnnnnnnnnnnnnnnnnnnnnnnnnnnnnnnnnnnnnnnnnnnnnnnnnnnnnnnnnnnnnnnnnnnnnnnnnnnnnnnnnnnnnnnnnnnnnnnnnnnnnnnnnnnnnnnnnnnnnnnnnnnnnnnnnnnnnnnnnnnnnnnnnnnnnnnnnnnnnnnnnnnnnnnnnnnnnnnnnnnnnnnnnnnnnnnnnnnnnnnnnnnnnnnnnnnnnnnnnnnnnnnnnnnnnnnnnnnnnnnnnnnnnnnnnnnnnnnnnnnnnnnnnnnnnnnnnnnnnnnnnnnnnnnnnnnnnnnnnnnnnnnnnnnnnnnnnnnnnnnnnnnnnnnnnnnnnnnnnnnnnnnnnnnnnnnnnnnnnnnnnnnnnnnnnnnnnnnnnnnnnnnnnnnnnnnnnnnnnnnnnnnnnnnnnnnnnnnnnnnnnnnnnnnnnnnnnnnnnnnnnnnnnnnnnnnnnnnnnnnnnnnnnnnnnnnnnnnnnnnnnnnnnnnnnnnnnnnnnnnnnnnnnnnnnnnnnnnnnnnnnnnnnnnnnnnnnnnnnnnnnnnnnnnnnnnnnnnnnnnnnnnnnnnnnnnnnnnnnnnnnnnnnnnnnnnnnnnnnnnnnnnnnnnnnnnnnnnnnnnnnnnnnnnnnnnnnnnnnnnnnnnnnnnnnnnnnnnnnnnnnnnnnnnnnnnnnnnnnnnnnnnnnnnnnnnnnnnnnnnnnnnnnnnnnnnnnnnnnnnnnnnnnnnnnnnnnnnnnnnnnnnnnnnnnnnnnnnnnnnnnnnnnnnnnnnnnnnnnnnnnnnnnnnnnnnnnnnnnnnnnnnnnnnnnnnnnnnnnnnnnnnnnnnnnnnnnnnnnnnnnnnnnnnnnnnnnnnnnnnnnnnnnnnnnnnnnnnnnnnnnnnnnnnnnnnnnnnnnnnnnnnnnnnnnnnnnnnnnnnnnnnnnnnnnnnnnnnnnnnnnnnnnnnnnnnnnnnnnnnnnnnnnnnnnnnnnnnnnnnnnnnnnnnnnnnnnnnnnnnnnnnnnnnnnnnnnnnnnnnnnnnnnnnnnnnnnnnnnnnnnnnnnnnnnnnnnnnnnnnnnnnnnnnnnnnnnnnnnnnnnnnnnnnnnnnnnnnnnnnnnnnnnnnnnnnnnnnnnnnnnnnnnnnnnnnnnnnnnnnnnnnnnnnnnnnnnnnnnnnnnnnnnnnnnnnnnnnnnnnnnnnnnnnnnnnnnnnnnnnnnnnnnnnnnnnnnnnnnnnnnnnnnnnnnnnnnnnnnnnnnnnnnnnnnnnnnnnnnnnnnnnnnnnnnnnnnnnnnnnnnnnnnnnnnnnnnnnnnnnnnnnnnnnnnnnnnnnnnnnnnnnnnnnnnnnnnnnnnnnnnnnnnnnnnnnnnnnnnnnnnnnnnnnnnnnnnnnnnnnnnnnnnnnnnnnnnnnnnnnnnnnnnnnnnnnnnnnnnnnnnnnnnnnnnnnnnnnnnnnnnnnnnnnnnnnnnnnnnnnnnnnnnnnnnnnnnnnnnnnnnnnnnnnnnnnnnnnnnnnnnnnnnnnnnnnnnnnnnnnnnnnnnnnnnnnnnnnnnnnnnnnnnnnnnnnnnnnnnnnnnnnnnnnnnnnnnnnnnnnnnnnnnnnnnnnnnnnnnnnnnnnnnnnnnnnnnnnnnnnnnnnnnnnnnnnnnnnnnnnnnnnnnnnnnnnnnnnnnnnnnnnnnnnnnnnnnnnnnnnnnnnnnnnnnnnnnnnnnnnnnnnnnnnnnnnnnnnnnnnnnnnnnnnnnnnnnnnnnnnnnnnnnnnnnnnnnnnnnnnnnnnnnnnnnnnnnnnnnnnnnnnnnnnnnnnnnnnnnnnnnnnnnnnnnnnnnnnnnnnnnnnnnnnnnnnnnnnnnnnnnnnnnnnnnnnnnnnnnnnnnnnnnnnnnnnnnnnnnnnnnnnnnnnnnnnnnnnnnnnnnnnnnnnnnnnnnnnnnnnnnnnnnnnnnnnnnnnnnnnnnnnnnnnnnnnnnnnnnnnnnnnnnnnnnnnnnnnnnnnnnnnnnnnnnnnnnnnnnnnnnnnnnnnnnnnnnnnnnnnnnnnnnnnnnnnnnnnnnnnnnnnnnnnnnnnnnnnnnnnnnnnnnnnnnnnnnnnnnnnnnnnnnnnnnnnnnnnnnnnnnnnnnnnnnnnnnnnnnnnnnnnnnnnnnnnnnnnnnnnnnnnnnnnnnnnnnnnnnnnnnnnnnnnnnnnnnnnnnnnnnnnnnnnnnnnnnnnnnnnnnnnnnnnnnnnnnnnnnnnnnnnnnnnnnnnnnnnnnnnnnnnnnnnnnnnnnnnnnnnnnnnnnnnnnnnnnnnnnnnnnnnnnnnnnnnnnnnnnnnnnnnnnnnnnnnnnnnnnnnnnnnnnnnnnnnnnnnnnnnnnnnnnnnnnnnnnnnnnnnnnnnnnnnnnnnnnnnnnnnnnnnnnnnnnnnnnnnnnnnnnnnnnnnnnnnnnnnnnnnnnnnnnnnnnnnnnnnnnnnnnnnnnnnnnnnnnnnnnnnnnnnnnnnnnnnnnnnnnnnnnnnnnnnnnnnnnnnnnnnnnnnnnnnnnnnnnnnnnnnnnnnnnnnnnnnnnnnnnnnnnnnnnnnnnnnnnnnnnnnnnnnnnnnnnnnnnnnnnnnnnnnnnnnnnnnnnnnnnnnnnnnnnnnnnnnnnnnnnnnnnnnnnnnnnnnnnnnnnnnnnnnnnnnnnnnnnnnnnnnnnnnnnnnnnnnnnnnnnnnnnnnnnnnnnnnnnnnnnnnnnnnnnnnnnnnnnnnnnnnnnnnnnnnnnnnnnnnnnnnnnnnnnnnnnnnnnnnnnnnnnnnnnnnnnnnnnnnnnnnnnnnnnnnnnnnnnnnnnnnnnnnnnnnnnnnnnnnnnnnnnnnnnnnnnnnnnnnnnnnnnnnnnnnnnnnnnnnnnnnnnnnnnnnnnnnnnnnnnnnnnnnnnnnnnnnnnnnnnnnnnnnnnnnnnnnnnnnnnnnnnnnnnnnnnnnnnnnnnnnnnnnnnnnnnnnnnnnnnnnnnnnnnnnnnnnnnnnnnnnnnnnnnnnnnnnnnnnnnnnnnnnnnnnnnnnnnnnnnnnnnnnnnnnnnnnnnnnnnnnnnnnnnnnnnnnnnnnnnnnnnnnnnnnnnnnnnnnnnnnnnnnnnnnnnnnnnnnnnnnnnnnnnnnnnnnnnnnnnnnnnnnnnnnnnnnnnnnnnnnnnnnnnnnnnnnnnnnnnnnnnnnnnnnnnnnnnnnnnnnnnnnnnnnnnnnnnnnnnnnnnnnnnnnnnnnnnnnnnnnnnnnnnnnnnnnnnnnnnnnnnnnnnnnnnnnnnnnnnnnnnnnnnnnnnnnnnnnnnnnnnnnnnnnnnnnnnnnnnnnnnnnnnnnnnnnnnnnnnnnnnnnnnnnnnnnnnnnnnnnnnnnnnnnnnnnnnnnnnnnnnnnnnnnnnnnnnnnnnnnnnnnnnnnnnnnnnnnnnnnnnnnnnnnnnnnnnnnnnnnnnnnnnnnnnnnnnnnnnnnnnnnnnnnnnnnnnnnnnnnnnnnnnnnnnnnnnnnnnnnnnnnnnnnnnnnnnnnnnnnnnnnnnnnnnnnnnnnnnnnnnnnnnnnnnnnnnnnnnnnnnnnnnnnnnnnnnnnnnnnnnnnnnnnnnnnnnnnnnnnnnnnnnnnnnnnnnnnnnnnnnnnnnnnnnnnnnnnnnnnnnnnnnnnnnnnnnnnnnnnnnnnnnnnnnnnnnnnnnnnnnnnnnnnnnnnnnnnnnnnnnnnnnnnnnnnnnnnnnnnnnnnnnnnnnnnnnnnnnnnnnnnnnnnnnnnnnnnnnnnnnnnnnnnnnnnnnnnnnnnnnnnnnnnnnnnnnnnnnnnnnnnnnnnnnnnnnnnnnnnnnnnnnnnnnnnnnnnnnnnnnnnnnnnnnnnnnnnnnnnnnnnnnnnnnnnnnnnnnnnnnnnnnnnnnnnnnnnnnnnnnnnnnnnnnnnnnnnnnnnnnnnnnnnnnnnnnnnnnnnnnnnnnnnnnnnnnnnnnnnnnnnnnnnnnnnnnnnnnnnnnnnnnnnnnnnnnnnnnnnnnnnnnnnnnnnnnnnnnnnnnnnnnnnnnnnnnnnnnnnnnnnnnnnnnnnnnnnnnnnnnnnnnnnnnnnnnnnnnnnnnnnnnnnnnnnnnnnnnnnnnnnnnnnnnnnnnnnnnnnnnnnnnnnnnnnnnnnnnnnnnnnnnnnnnnnnnnnnnnnnnnnnnnnnnnnnnnnnnnnnnnnnnnnnnnnnnnnnnnnnnnnnnnnnnnnnnnnnnnnnnnnnnnnnnnnnnnnnnnnnnnnnnnnnnnnnnnnnnnnnnnnnnnnnnnnnnnnnnnnnnnnnnnnnnnnnnnnnnnnnnnnnnnnnnnnnnnnnnnnnnnnnnnnnnnnnnnnnnnnnnnnnnnnnnnnnnnnnnnnnnnnnnnnnnnnnnnnnnnnnnnnnnnnnnnnnnnnnnnnnnnnnnnnnnnnnnnnnnnnnnnnnnnnnnnnnnnnnnnnnnnnnnnnnnnnnnnnnnnnnnnnnnnnnnnnnnnnnnnnnnnnnnnnnnnnnnnnnnnnnnnnnnnnnnnnnnnnnnnnnnnnnnnnnnnnnnnnnnnnnnnnnnnnnnnnnnnnnnnnnnnnnnnnnnnnnnnnnnnnnnnnnnnnnnnnnnnnnnnnnnnnnnnnnnnnnnnnnnnnnnnnnnnnnnnnnnnnnnnnnnnnnnnnnnnnnnnnnnnnnnnnnnnnnnnnnnnnnnnnnnnnnnnnnnnnnnnnnnnnnnnnnnnnnnnnnnnnnnnnnnnnnnnnnnnnnnnnnnnnnnnnnnnnnnnnnnnnnnnnnnnnnnnnnnnnnnnnnnnnnnnnnnnnnnnnnnnnnnnnnnnnnnnnnnnnnnnnnnnnnnnnnnnnnnnnnnnnnnnnnnnnnnnnnnnnnnnnnnnnnnnnnnnnnnnnnnnnnnnnnnnnnnnnnnnnnnnnnnnnnnnnnnnnnnnnnnnnnnnnnnnnnnnnnnnnnnnnnnnnnnnnnnnnnnnnnnnnnnnnnnnnnnnnnnnnnnnnnnnnnnnnnnnnnnnnnnnnnnnnnnnnnnnnnnnnnnnnnnnnnnnnnnnnnnnnnnnnnnnnnnnnnnnnnnnnnnnnnnnnnnnnnnnnnnnnnnnnnnnnnnnnnnnnnnnnnnnnnnnnnnnnnnnnnnnnnnnnnnnnnnnnnnnnnnnnnnnnnnnnnnnnnnnnnnnnnnnnnnnnnnnnnnnnnnnnnnnnnnnnnnnnnnnnnnnnnnnnnnnnnnnnnnnnnnnnnnnnnnnnnnnnnnnnnnnnnnnnnnnnnnnnnnnnnnnnnnnnnnnnnnnnnnnnnnnnnnnnnnnnnnnnnnnnnnnnnnnnnnnnnnnnnnnnnnnnnnnnnnnnnnnnnnnnnnnnnnnnnnnnnnnnnnnnnnnnnnnnnnnnnnnnnnnnnnnnnnnnnnnnnnnnnnnnnnnnnnnnnnnnnnnnnnnnnnnnnnnnnnnnnnnnnnnnnnnnnnnnnnnnnnnnnnnnnnnnnnnnnnnnnnnnnnnnnnnnnnnnnnnnnnnnnnnnnnnnnnnnnnnnnnnnnnnnnnnnnnnnnnnnnnnnnnnnnnnnnnnnnnnnnnnnnnnnnnnnnnnnnnnnnnnnnnnnnnnnnnnnnnnnnnnnnnnnnnnnnnnnnnnnnnnnnnnnnnnnnnnnnnnnnnnnnnnnnnnnnnnnnnnnnnnnnnnnnnnnnnnnnnnnnnnnnnnnnnnnnnnnnnnnnnnnnnnnnnnnnnnnnnnnnnnnnnnnnnnnnnnnnnnnnnnnnnnnnnnnnnnnnnnnnnnnnnnnnnnnnnnnnnnnnnnnnnnnnnnnnnnnnnnnnnnnnnnnnnnnnnnnnnnnnnnnnnnnnnnnnnnnnnnnnnnnnnnnnnnnnnnnnnnnnnnnnnnnnnnnnnnnnnnnnnnnnnnnnnnnnnnnnnnnnnnnnnnnnnnnnnnnnnnnnnnnnnnnnnnnnnnnnnnnnnnnnnnnnnnnnnnnnnnnnnnnnnnnnnnnnnnnnnnnnnnnnnnnnnnnnnnnnnnnnnnnnnnnnnnnnnnnnnnnnnnnnnnnnnnnnnnnnnnnnnnnnnnnnnnnnnnnnnnnnnnnnnnnnnnnnnnnnnnnnnnnnnnnnnnnnnnnnnnnnnnnnnnnnnnnnnnnnnnnnnnnnnnnnnnnnnnnnnnnnnnnnnnnnnnnnnnnnnnnnnnnnnnnnnnnnnnnnnnnnnnnnnnnnnnnnnnnnnnnnnnnnnnnnnnnnnnnnnnnnnnnnnnnnnnnnnnnnnnnnnnnnnnnnnnnnnnnnnnnnnnnnnnnnnnnnnnnnnnnnnnnnnnnnnnnnnnnnnnnnnnnnnnnnnnnnnnnnnnnnnnnnnnnnnnnnnnnnnnnnnnnnnnnnnnnnnnnnnnnnnnnnnnnnnnnnnnnnnnnnnnnnnnnnnnnnnnnnnnnnnnnnnnnnnnnnnnnnnnnnnnnnnnnnnnnnnnnnnnnnnnnnnnnnnnnnnnnnnnnnnnnnnnnnnnnnnnnnnnnnnnnnnnnnnnnnnnnnnnnnnnnnnnnnnnnnnnnnnnnnnnnnnnnnnnnnnnnnnnnnnnnnnnnnnnnnnnnnnnnnnnnnnnnnnnnnnnnnnnnnnnnnnnnnnnnnnnnnnnnnnnnnnnnnnnnnnnnnnnnnnnnnnnnnnnnnnnnnnnnnnnnnnnnnnnnnnnnnnnnnnnnnnnnnnnnnnnnnnnnnnnnnnnnnnnnnnnnnnnnnnnnnnnnnnnnnnnnnnnnnnnnnnnnnnnnnnnnnnnnnnnnnnnnnnnnnnnnnnnnnnnnnnnnnnnnnnnnnnnnnnnnnnnnnnnnnnnnnnnnnnnnnnnnnnnnnnnnnnnnnnnnnnnnnnnnnnnnnnnnnnnnnnnnnnnnnnnnnnnnnnnnnnnnnnnnnnnnnnnnnnnnnnnnnnnnnnnnnnnnnnnnnnnnnnnnnnnnnnnnnnnnnnnnnnnnnnnnnnnnnnnnnnnnnnnnnnnnnnnnnnnnnnnnnnnnnnnnnnnnnnnnnnnnnnnnnnnnnnnnnnnnnnnnnnnnnnnnnnnnnnnnnnnnnnnnnnnnnnnnnnnnnnnnnnnnnnnnnnnnnnnnnnnnnnnnnnnnnnnnnnnnnnnnnnnnnnnnnnnnnnnnnnnnnnnnnnnnnnnnnnnnnnnnnnnnnnnnnnnnnnnnnnnnnnnnnnnnnnnnnnnnnnnnnnnnnnnnnnnnnnnnnnnnnnnnnnnnnnnnnnnnnnnnnnnnnnnnnnnnnnnnnnnnnnnnnnnnnnnnnnnnnnnnnnnnnnnnnnnnnnnnnnnnnnnnnnnnnnnnnnnnnnnnnnnnnnnnnnnnnnnnnnnnnnnnnnnnnnnnnnnnnnnnnnnnnnnnnnnnnnnnnnnnnnnnnnnnnnnnnnnnnnnnnnnnnnnnnnnnnnnnnnnnnnnnnnnnnnnnnnnnnnnnnnnnnnnnnnnnnnnnnnnnnnnnnnnnnnnnnnnnnnnnnnnnnnnnnnnnnnnnnnnnnnnnnnnnnnnnnnnnnnnnnnnnnnnnnnnnnnnnnnnnnnnnnnnnnnnnnnnnnnnnnnnnnnnnnnnnnnnnnnnnnnnnnnnnnnnnnnnnnnnnnnnnnnnnnnnnnnnnnnnnnnnnnnnnnnnnnnnnnnnnnnnnnnnnnnnnnnnnnnnnnnnnnnnnnnnnnnnnnnnnnnnnnnnnnnnnnnnnnnnnnnnnnnnnnnnnnnnnnnnnnnnnnnnnnnnnnnnnnnnnnnnnnnnnnnnnnnnnnnnnnnnnnnnnnnnnnnnnnnnnnnnnnnnnnnnnnnnnnnnnnnnnnnnnnnnnnnnnnnnnnnnnnnnnnnnnnnnnnnnnnnnnnnnnnnnnnnnnnnnnnnnnnnnnnnnnnnnnnnnnnnnnnnnnnnnnnnnnnnnnnnnnnnnnnnnnnnnnnnnnnnnnnnnnnnnnnnnnnnnnnnnnnnnnnnnnnnnnnnnnnnnnnnnnnnnnnnnnnnnnnnnnnnnnnnnnnnnnnnnnnnnnnnnnnnnnnnnnnnnnnnnnnnnnnnnnnnnnnnnnnnnnnnnnnnnnnnnnnnnnnnnnnnnnnnnnnnnnnnnnnnnnnnnnnnnnnnnnnnnnnnnnnnnnnnnnnnnnnnnnnnnnnnnnnnnnnnnnnnnnnnnnnnnnnnnnnnnnnnnnnnnnnnnnnnnnnnnnnnnnnnnnnnnnnnnnnnnnnnnnnnnnnnnnnnnnnnnnnnnnnnnnnnnnnnnnnnnnnnnnnnnnnnnnnnnnnnnnnnnnnnnnnnnnnnnnnnnnnnnnnnnnnnnnnnnnnnnnnnnnnnnnnnnnnnnnnnnnnnnnnnnnnnnnnnnnnnnnnnnnnnnnnnnnnnnnnnnnnnnnnnnnnnnnnnnnnnnnnnnnnnnnnnnnnnnnnnnnnnnnnnnnnnnnnnnnnnnnnnnnnnnnnnnnnnnnnnnnnnnnnnnnnnnnnnnnnnnnnnnnnnnnnnnnnnnnnnnnnnnnnnnnnnnnnnnnnnnnnnnnnnnnnnnnnnnnnnnnnnnnnnnnnnnnnnnnnnnnnnnnnnnnnnnnnnnnnnnnnnnnnnnnnnnnnnnnnnnnnnnnnnnnnnnnnnnnnnnnnnnnnnnnnnnnnnnnnnnnnnnnnnnnnnnnnnnnnnnnnnnnnnnnnnnnnnnnnnnnnnnnnnnnnnnnnnnnnnnnnnnnnnnnnnnnnnnnnnnnnnnnnnnnnnnnnnnnnnnnnnnnnnnnnnnnnnnnnnnnnnnnnnnnnnnnnnnnnnnnnnnnnnnnnnnnnnnnnnnnnnnnnnnnnnnnnnnnnnnnnnnnnnnnnnnnnnnnnnnnnnnnnnnnnnnnnnnnnnnnnnnnnnnnnnnnnnnnnnnnnnnnnnnnnnnnnnnnnnnnnnnnnnnnnnnnnnnnnnnnnnnnnnnnnnnnnnnnnnnnnnnnnnnnnnnnnnnnnnnnnnnnnnnnnnnnnnnnnnnnnnnnnnnnnnnnnnnnnnnnnnnnnnnnnnnnnnnnnnnnnnnnnnnnnnnnnnnnnnnnnnnnnnnnnnnnnnnnnnnnnnnnnnnnnnnnnnnnnnnnnnnnnnnnnnnnnnnnnnnnnnnnnnnnnnnnnnnnnnnnnnnnnnnnnnnnnnnnnnnnnnnnnnnnnnnnnnnnnnnnnnnnnnnnnnnnnnnnnnnnnnnnnnnnnnnnnnnnnnnnnnnnnnnnnnnnnnnnnnnnnnnnnnnnnnnnnnnnnnnnnnnnnnnnnnnnnnnnnnnnnnnnnnnnnnnnnnnnnnnnnnnnnnnnnnnnnnnnnnnnnnnnnnnnnnnnnnnnnnnnnnnnnnnnnnnnnnnnnnnnnnnnnnnnnnnnnnnnnnnnnnnnnnnnnnnnnnnnnnnnnnnnnnnnnnnnnnnnnnnnnnnnnnnnnnnnnnnnnnnnnnnnnnnnnnnnnnnnnnnnnnnnnnnnnnnnnnnnnnnnnnnnnnnnnnnnnnnnnnnnnnnnnnnnnnnnnnnnnnnnnnnnnnnnnnnnnnnnnnnnnnnnnnnnnnnnnnnnnnnnnnnnnnnnnnnnnnnnnnnnnnnnnnnnnnnnnnnnnnnnnnnnnnnnnnnnnnnnnnnnnnnnnnnnnnnnnnnnnnnnnnnnnnnnnnnnnnnnnnnnnnnnnnnnnnnnnnnnnnnnnnnnnnnnnnnnnnnnnnnnnnnnnnnnnnnnnnnnnnnnnnnnnnnnnnnnnnnnnnnnnnnnnnnnnnnnnnnnnnnnnnnnnnnnnnnnnnnnnnnnnnnnnnnnnnnnnnnnnnnnnnnnnnnnnnnnnnnnnnnnnnnnnnnnnnnnnnnnnnnnnnnnnnnnnnnnnnnnnnnnnnnnnnnnnnnnnnnnnnnnnnnnnnnnnnnnnnnnnnnnnnnnnnnnnnnnnnnnnnnnnnnnnnnnnnnnnnnnnnnnnnnnnnnnnnnnnnnnnnnnnnnnnnnnnnnnnnnnnnnnnnnnnnnnnnnnnnnnnnnnnnnnnnnnnnnnnnnnnnnnnnnnnnnnnnnnnnnnnnnnnnnnnnnnnnnnnnnnnnnnnnnnnnnnnnnnnnnnnnnnnnnnnnnnnnnnnnnnnnnnnnnnnnnnnnnnnnnnnnnnnnnnnnnnnnnnnnnnnnnnnnnnnnnnnnnnnnnnnnnnnnnnnnnnnnnnnnnnnnnnnnnnnnnnnnnnnnnnnnnnnnnnnnnnnnnnnnnnnnnnnnnnnnnnnnnnnnnnnnnnnnnnnnnnnnnnnnnnnnnnnnnnnnnnnnnnnnnnnnnnnnnnnnnnnnnnnnnnnnnnnnnnnnnnnnnnnnnnnnnnnnnnnnnnnnnnnnnnnnnnnnnnnnnnnnnnnnnnnnnnnnnnnnnnnnnnnnnnnnnnnnnnnnnnnnnnnnnnnnnnnnnnnnnnnnnnnnnnnnnnnnnnnnnnnnnnnnnnnnnnnnnnnnnnnnnnnnnnnnnnnnnnnnnnnnnnnnnnnnnnnnnnnnnnnnnnnnnnnnnnnnnnnnnnnnnnnnnnnnnnnnnnnnnnnnnnnnnnnnnnnnnnnnnnnnnnnnnnnnnnnnnnnnnnnnnnnnnnnnnnnnnnnnnnnnnnnnnnnnnnnnnnnnnnnnnnnnnnnnnnnnnnnnnnnnnnnnnnnnnnnnnnnnnnnnnnnnnnnnnnnnnnnnnnnnnnnnnnnnnnnnnnnnnnnnnnnnnnnnnnnnnnnnnnnnnnnnnnnnnnnnnnnnnnnnnnnnnnnnnnnnnnnnnnnnnnnnnnnnnnnnnnnnnnnnnnnnnnnnnnnnnnnnnnnnnnnnnnnnnnnnnnnnnnnnnnnnnnnnnnnnnnnnnnnnnnnnnnnnnnnnnnnnnnnnnnnnnnnnnnnnnnnnnnnnnnnnnnnnnnnnnnnnnnnnnnnnnnnnnnnnnnnnnnnnnnnnnnnnnnnnnnnnnnnnnnnnnnnnnnnnnnnnnnnnnnnnnnnnnnnnnnnnnnnnnnnnnnnnnnnnnnnnnnnnnnnnnnnnnnnnnnnnnnnnnnnnnnnnnnnnnnnnnnnnnnnnnnnnnnnnnnnnnnnnnnnnnnnnnnnnnnnnnnnnnnnnnnnnnnnnnnnnnnnnnnnnnnnnnnnnnnnnnnnnnnnnnnnnnnnnnnnnnnnnnnnnnnnnnnnnnnnnnnnnnnnnnnnnnnnnnnnnnnnnnnnnnnnnnnnnnnnnnnnnnnnnnnnnnnnnnnnnnnnnnnnnnnnnnnnnnnnnnnnnnnnnnnnnnnnnnnnnnnnnnnnnnnnnnnnnnnnnnnnnnnnnnnnnnnnnnnnnnnnnnnnnnnnnnnnnnnnnnnnnnnnnnnnnnnnnnnnnnnnnnnnnnnnnnnnnnnnnnnnnnnnnnnnnnnnnnnnnnnnnnnnnnnnnnnnnnnnnnnnnnnnnnnnnnnnnnnnnnnnnnnnnnnnnnnnnnnnnnnnnnnnnnnnnnnnnnnnnnnnnnnnnnnnnnnnnnnnnnnnnnnnnnnnnnnnnnnnnnnnnnnnnnnnnnnnnnnnnnnnnnnnnnnnnnnnnnnnnnnnnnnnnnnnnnnnnnnnnnnnnnnnnnnnnnnnnnnnnnnnnnnnnnnnnnnnnnnnnnnnnnnnnnnnnnnnnnnnnnnnnnnnnnnnnnnnnnnnnnnnnnnnnnnnnnnnnnnnnnnnnnnnnnnnnnnnnnnnnnnnnnnnnnnnnnnnnnnnnnnnnnnnnnnnnnnnnnnnnnnnnnnnnnnnnnnnnnnnnnnnnnnnnnnnnnnnnnnnnnnnnnnnnnnnnnnnnnnnnnnnnnnnnnnnnnnnnnnnnnnnnnnnnnnnnnnnnnnnnnnnnnnnnnnnnnnnnnnnnnnnnnnnnnnnnnnnnnnnnnnnnnnnnnnnnnnnnnnnnnnnnnnnnnnnnnnnnnnnnnnnnnnnnnnnnnnnnnnnnnnnnnnnnnnnnnnnnnnnnnnnnnnnnnnnnnnnnnnnnnnnnnnnnnnnnnnnnnnnnnnnnnnnnnnnnnnnnnnnnnnnnnnnnnnnnnnnnnnnnnnnnnnnnnnnnnnnnnnnnnnnnnnnnnnnnnnnnnnnnnnnnnnnnnnnnnnnnnnnnnnnnnnnnnnnnnnnnnnnnnnnnnnnnnnnnnnnnnnnnnnnnnnnnnnnnnnnnnnnnnnnnnnnnnnnnnnnnnnnnnnnnnnnnnnnnnnnnnnnnnnnnnnnnnnnnnnnnnnnnnnnnnnnnnnnnnnnnnnnnnnnnnnnnnnnnnnnnnnnnnnnnnnnnnnnnnnnnnnnnnnnnnnnnnnnnnnnnnnnnnnnnnnnnnnnnnnnnnnnnnnnnnnnnnnnnnnnnnnnnnnnnnnnnnnnnnnnnnnnnnnnnnnnnnnnnnnnnnnnnnnnnnnnnnnnnnnnnnnnnnnnnnnnnnnnnnnnnnnnnnnnnnnnnnnnnnnnnnnnnnnnnnnnnnnnnnnnnnnnnnnnnnnnnnnnnnnnnnnnnnnnnnnnnnnnnnnnnnnnnnnnnnnnnnnnnnnnnnnnnnnnnnnnnnnnnnnnnnnnnnnnnnnnnnnnnnnnnnnnnnnnnnnnnnnnnnnnnnnnnnnnnnnnnnnnnnnnnnnnnnnnnnnnnnnnnnnnnnnnnnnnnnnnnnnnnnnnnnnnnnnnnnnnnnnnnnnnnnnnnnnnnnnnnnnnnnnnnnnnnnnnnnnnnnnnnnnnnnnnnnnnnnnnnnnnnnnnnnnnnnnnnnnnnnnnnnnnnnnnnnnnnnnnnnnnnnnnnnnnnnnnnnnnnnnnnnnnnnnnnnnnnnnnnnnnnnnnnnnnnnnnnnnnnnnnnnnnnnnnnnnnnnnnnnnnnnnnnnnnnnnnnnnnnnnnnnnnnnnnnnnnnnnnnnnnnnnnnnnnnnnnnnnnnnnnnnnnnnnnnnnnnnnnnnnnnnnnnnnnnnnnnnnnnnnnnnnnnnnnnnnnnnnnnnnnnnnnnnnnnnnnnnnnnnnnnnnnnnnnnnnnnnnnnnnnnnnnnnnnnnnnnnnnnnnnnnnnnnnnnnnnnnnnnnnnnnnnnnnnnnnnnnnnnnnnnnnnnnnnnnnnnnnnnnnnnnnnnnnnnnnnnnnnnnnnnnnnnnnnnnnnnnnnnnnnnnnnnnnnnnnnnnnnnnnnnnnnnnnnnnnnnnnnnnnnnnnnnnnnnnnnnnnnnnnnnnnnnnnnnnnnnnnnnnnnnnnnnnnnnnnnnnnnnnnnnnnnnnnnnnnnnnnnnnnnnnnnnnnnnnnnnnnnnnnnnnnnnnnnnnnnnnnnnnnnnnnnnnnnnnnnnnnnnnnnnnnnnnnnnnnnnnnnnnnnnnnnnnnnnnnnnnnnnnnnnnnnnnnnnnnnnnnnnnnnnnnnnnnnnnnnnnnnnnnnnnnnnnnnnnnnnnnnnnnnnnnnnnnnnnnnnnnnnnnnnnnnnnnnnnnnnnnnnnnnnnnnnnnnnnnnnnnnnnnnnnnnnnnnnnnnnnnnnnnnnnnnnnnnnnnnnnnnnnnnnnnnnnnnnnnnnnnnnnnnnnnnnnnnnnnnnnnnnnnnnnnnnnnnnnnnnnnnnnnnnnnnnnnnnnnnnnnnnnnnnnnnnnnnnnnnnnnnnnnnnnnnnnnnnnnnnnnnnnnnnnnnnnnnnnnnnnnnnnnnnnnnnnnnnnnnnnnnnnnnnnnnnnnnnnnnnnnnnnnnnnnnnnnnnnnnnnnnnnnnnnnnnnnnnnnnnnnnnnnnnnnnnnnnnnnnnnnnnnnnnnnnnnnnnnnnnnnnnnnnnnnnnnnnnnnnnnnnnnnnnnnnnnnnnnnnnnnnnnnnnnnnnnnnnnnnnnnnnnnnnnnnnnnnnnnnnnnnnnnnnnnnnnnnnnnnnnnnnnnnnnnnnnnnnnnnnnnnnnnnnnnnnnnnnnnnnnnnnnnnnnnnnnnnnnnnnnnnnnnnnnnnnnnnnnnnnnnnnnnnnnnnnnnnnnnnnnnnnnnnnnnnnnnnnnnnnnnnnnnnnnnnnnnnnnnnnnnnnnnnnnnnnnnnnnnnnnnnnnnnnnnnnnnnnnnnnnnnnnnnnnnnnnnnnnnnnnnnnnnnnnnnnnnnnnnnnnnnnnnnnnnnnnnnnnnnnnnnnnnnnnnnnnnnnnnnnnnnnnnnnnnnnnnnnnnnnnnnnnnnnnnnnnnnnnnnnnnnnnnnnnnnnnnnnnnnnnnnnnnnnnnnnnnnnnnnnnnnnnnnnnnnnnnnnnnnnnnnnnnnnnnnnnnnnnnnnnnnnnnnnnnnnnnnnnnnnnnnnnnnnnnnnnnnnnnnnnnnnnnnnnnnnnnnnnnnnnnnnnnnnnnnnnnnnnnnnnnnnnnnnnnnnnnnnnnnnnnnnnnnnnnnnnnnnnnnnnnnnnnnnnnnnnnnnnnnnnnnnnnnnnnnnnnnnnnnnnnnnnnnnnnnnnnnnnnnnnnnnnnnnnnnnnnnnnnnnnnnnnnnnnnnnnnnnnnnnnnnnnnnnnnnnnnnnnnnnnnnnnnnnnnnnnnnnnnnnnnnnnnnnnnnnnnnnnnnnnnnnnnnnnnnnnnnnnnnnnnnnnnnnnnnnnnnnnnnnnnnnnnnnnnnnnnnnnnnnnnnnnnnnnnnnnnnnnnnnnnnnnnnnnnnnnnnnnnnnnnnnnnnnnnnnnnnnnnnnnnnnnnnnnnnnnnnnnnnnnnnnnnnnnnnnnnnnnnnnnnnnnnnnnnnnnnnnnnnnnnnnnnnnnnnnnnnnnnnnnnnnnnnnnnnnnnnnnnnnnnnnnnnnnnnnnnnnnnnnnnnnnnnnnnnnnnnnnnnnnnnnnnnnnnnnnnnnnnnnnnnnnnnnnnnnnnnnnnnnnnnnnnnnnnnnnnnnnnnnnnnnnnnnnnnnnnnnnnnnnnnnnnnnnnnnnnnnnnnnnnnnnnnnnnnnnnnnnnnnnnnnnnnnnnnnnnnnnnnnnnnnnnnnnnnnnnnnnnnnnnnnnnnnnnnnnnnnnnnnnnnnnnnnnnnnnnnnnnnnnnnnnnnnnnnnnnnnnnnnnnnnnnnnnnnnnnnnnnnnnnnnnnnnnnnnnnnnnnnnnnnnnnnnnnnnnnnnnnnnnnnnnnnnnnnnnnnnnnnnnnnnnnnnnnnnnnnnnnnnnnnnnnnnnnnnnnnnnnnnnnnnnnnnnnnnnnnnnnnnnnnnnnnnnnnnnnnnnnnnnnnnnnnnnnnnnnnnnnnnnnnnnnnnnnnnnnnnnnnnnnnnnnnnnnnnnnnnnnnnnnnnnnnnnnnnnnnnnnnnnnnnnnnnnnnnnnnnnnnnnnnnnnnnnnnnnnnnnnnnnnnnnnnnnnnnnnnnnnnnnnnnnnnnnnnnnnnnnnnnnnnnnnnnnnnnnnnnnnnnnnnnnnnnnnnnnnnnnnnnnnnnnnnnnnnnnnnnnnnnnnnnnnnnnnnnnnnnnnnnnnnnnnnnnnnnnnnnnnnnnnnnnnnnnnnnnnnnnnnnnnnnnnnnnnnnnnnnnnnnnnnnnnnnnnnnnnnnnnnnnnnnnnnnnnnnnnnnnnnnnnnnnnnnnnnnnnnnnnnnnnnnnnnnnnnnnnnnnnnnnnnnnnnnnnnnnnnnnnnnnnnnnnnnnnnnnnnnnnnnnnnnnnnnnnnnnnnnnnnnnnnnnnnnnnnnnnnnnnnnnnnnnnnnnnnnnnnnnnnnnnnnnnnnnnnnnnnnnnnnnnnnnnnnnnnnnnnnnnnnnnnnnnnnnnnnnnnnnnnnnnnnnnnnnnnnnnnnnnnnnnnnnnnnnnnnnnnnnnnnnnnnnnnnnnnnnnnnnnnnnnnnnnnnnnnnnnnnnnnnnnnnnnnnnnnnnnnnnnnnnnnnnnnnnnnnnnnnnnnnnnnnnnnnnnnnnnnnnnnnnnnnnnnnnnnnnnnnnnnnnnnnnnnnnnnnnnnnnnnnnnnnnnnnnnnnnnnnnnnnnnnnnnnnnnnnnnnnnnnnnnnnnnnnnnnnnnnnnnnnnnnnnnnnnnnnnnnnnnnnnnnnnnnnnnnnnnnnnnnnnnnnnnnnnnnnnnnnnnnnnnnnnnnnnnnnnnnnnnnnnnnnnnnnnnnnnnnnnnnnnnnnnnnnnnnnnnnnnnnnnnnnnnnnnnnnnnnnnnnnnnnnnnnnnnnnnnnnnnnnnnnnnnnnnnnnnnnnnnnnnnnnnnnnnnnnnnnnnnnnnnnnnnnnnnnnnnnnnnnnnnnnnnnnnnnnnnnnnnnnnnnnnnnnnnnnnnnnnnnnnnnnnnnnnnnnnnnnnnnnnnnnnnnnnnnnnnnnnnnnnnnnnnnnnnnnnnnnnnnnnnnnnnnnnnnnnnnnnnnnnnnnnnnnnnnnnnnnnnnnnnnnnnnnnnnnnnnnnnnnnnnnnnnnnnnnnnnnnnnnnnnnnnnnnnnnnnnnnnnnnnnnnnnnnnnnnnnnnnnnnnnnnnnnnnnnnnnnnnnnnnnnnnnnnnnnnnnnnnnnnnnnnnnnnnnnnnnnnnnnnnnnnnnnnnnnnnnnnnnnnnnnnnnnnnnnnnnnnnnnnnnnnnnnnnnnnnnnnnnnnnnnnnnnnnnnnnnnnnnnnnnnnnnnnnnnnnnnnnnnnnnnnnnnnnnnnnnnnnnnnnnnnnnnnnnnnnnnnnnnnnnnnnnnnnnnnnnnnnnnnnnnnnnnnnnnnnnnnnnnnnnnnnnnnnnnnnnnnnnnnnnnnnnnnnnnnnnnnnnnnnnnnnnnnnnnnnnnnnnnnnnnnnnnnnnnnnnnnnnnnnnnnnnnnnnnnnnnnnnnnnnnnnnnnnnnnnnnnnnnnnnnnnnnnnnnnnnnnnnnnnnnnnnnnnnnnnnnnnnnnnnnnnnnnnnnnnnnnnnnnnnnnnnnnnnnnnnnnnnnnnnnnnnnnnnnnnnnnnnnnnnnnnnnnnnnnnnnnnnnnnnnnnnnnnnnnnnnnnnnnnnnnnnnnnnnnnnnnnnnnnnnnnnnnnnnnnnnnnnnnnnnnnnnnnnnnnnnnnnnnnnnnnnnnnnnnnnnnnnnnnnnnnnnnnnnnnnnnnnnnnnnnnnnnnnnnnnnnnnnnnnnnnnnnnnnnnnnnnnnnnnnnnnnnnnnnnnnnnnnnnnnnnnnnnnnnnnnnnnnnnnnnnnnnnnnnnnnnnnnnnnnnnnnnnnnnnnnnnnnnnnnnnnnnnnnnnnnnnnnnnnnnnnnnnnnnnnnnnnnnnnnnnnnnnnnnnnnnnnnnnnnnnnnnnnnnnnnnnnnnnnnnnnnnnnnnnnnnnnnnnnnnnnnnnnnnnnnnnnnnnnnnnnnnnnnnnnnnnnnnnnnnnnnnnnnnnnnnnnnnnnnnnnnnnnnnnnnnnnnnnnnnnnnnnnnnnnnnnnnnnnnnnnnnnnnnnnnnnnnnnnnnnnnnnnnnnnnnnnnnnnnnnnnnnnnnnnnnnnnnnnnnnnnnnnnnnnnnnnnnnnnnnnnnnnnnnnnnnnnnnnnnnnnnnnnnnnnnnnnnnnnnnnnnnnnnnnnnnnnnnnnnnnnnnnnnnnnnnnnnnnnnnnnnnnnnnnnnnnnnnnnnnnnnnnnnnnnnnnnnnnnnnnnnnnnnnnnnnnnnnnnnnnnnnnnnnnnnnnnnnnnnnnnnnnnnnnnnnnnnnnnnnnnnnnnnnnnnnnnnnnnnnnnnnnnnnnnnnnnnnnnnnnnnnnnnnnnnnnnnnnnnnnnnnnnnnnnnnnnnnnnnnnnnnnnnnnnnnnnnnnnnnnnnnnnnnnnnnnnnnnnnnnnnnnnnnnnnnnnnnnnnnnnnnnnnnnnnnnnnnnnnnnnnnnnnnnnnnnnnnnnnnnnnnnnnnnnnnnnnnnnnnnnnnnnnnnnnnnnnnnnnnnnnnnnnnnnnnnnnnnnnnnnnnnnnnnnnnnnnnnnnnnnnnnnnnnnnnnnnnnnnnnnnnnnnnnnnnnnnnnnnnnnnnnnnnnnnnnnnnnnnnnnnnnnnnnnnnnnnnnnnnnnnnnnnnnnnnnnnnnnnnnnnnnnnnnnnnnnnnnnnnnnnnnnnnnnnnnnnnnnnnnnnnnnnnnnnnnnnnnnnnnnnnnnnnnnnnnnnnnnnnnnnnnnnnnnnnnnnnnnnnnnnnnnnnnnnnnnnnnnnnnnnnnnnnnnnnnnnnnnnnnnnnnnnnnnnnnnnnnnnnnnnnnnnnnnnnnnnnnnnnnnnnnnnnnnnnnnnnnnnnnnnnnnnnnnnnnnnnnnnnnnnnnnnnnnnnnnnnnnnnnnnnnnnnnnnnnnnnnnnnnnnnnnnnnnnnnnnnnnnnnnnnnnnnnnnnnnnnnnnnnnnnnnnnnnnnnnnnnnnnnnnnnnnnnnnnnnnnnnnnnnnnnnnnnnnnnnnnnnnnnnnnnnnnnnnnnnnnnnnnnnnnnnnnnnnnnnnnnnnnnnnnnnnnnnnnnnnnnnnnnnnnnnnnnnnnnnnnnnnnnnnnnnnnnnnnnnnnnnnnnnnnnnnnnnnnnnnnnnnnnnnnnnnnnnnnnnnnnnnnnnnnnnnnnnnnnnnnnnnnnnnnnnnnnnnnnnnnnnnnnnnnnnnnnnnnnnnnnnnnnnnnnnnnnnnnnnnnnnnnnnnnnnnnnnnnnnnnnnnnnnnnnnnnnnnnnnnnnnnnnnnnnnnnnnnnnnnnnnnnnnnnnnnnnnnnnnnnnnnnnnnnnnnnnnnnnnnnnnnnnnnnnnnnnnnnnnnnnnnnnnnnnnnnnnnnnnnnnnnnnnnnnnnnnnnnnnnnnnnnnnnnnnnnnnnnnnnnnnnnnnnnnnnnnnnnnnnnnnnnnnnnnnnnnnnnnnnnnnnnnnnnnnnnnnnnnnnnnnnnnnnnnnnnnnnnnnnnnnnnnnnnnnnnnnnnnnnnnnnnnnnnnnnnnnnnnnnnnnnnnnnnnnnnnnnnnnnnnnnnnnnnnnnnnnnnnnnnnnnnnnnnnnnnnnnnnnnnnnnnnnnnnnnnnnnnnnnnnnnnnnnnnnnnnnnnnnnnnnnnnnnnnnnnnnnnnnnnnnnnnnnnnnnnnnnnnnnnnnnnnnnnnnnnnnnnnnnnnnnnnnnnnnnnnnnnnnnnnnnnnnnnnnnnnnnnnnnnnnnnnnnnnnnnnnnnnnnnnnnnnnnnnnnnnnnnnnnnnnnnnnnnnnnnnnnnnnnnnnnnnnnnnnnnnnnnnnnnnnnnnnnnnnnnnnnnnnnnnnnnnnnnnnnnnnnnnnnnnnnnnnnnnnnnnnnnnnnnnnnnnnnnnnnnnnnnnnnnnnnnnnnnnnnnnnnnnnnnnnnnnnnnnnnnnnnnnnnnnnnnnnnnnnnnnnnnnnnnnnnnnnnnnnnnnnnnnnnnnnnnnnnnnnnnnnnnnnnnnnnnnnnnnnnnnnnnnnnnnnnnnnnnnnnnnnnnnnnnnnnnnnnnnnnnnnnnnnnnnnnnnnnnnnnnnnnnnnnnnnnnnnnnnnnnnnnnnnnnnnnnnnnnnnnnnnnnnnnnnnnnnnnnnnnnnnnnnnnnnnnnnnnnnnnnnnnnnnnnnnnnnnnnnnnnnnnnnnnnnnnnnnnnnnnnnnnnnnnnnnnnnnnnnnnnnnnnnnnnnnnnnnnnnnnnnnnnnnnnnnnnnnnnnnnnnnnnnnnnnnnnnnnnnnnnnnnnnnnnnnnnnnnnnnnnnnnnnnnnnnnnnnnnnnnnnnnnnnnnnnnnnnnnnnnnnnnnnnnnnnnnnnnnnnnnnnnnnnnnnnnnnnnnnnnnnnnnnnnnnnnnnnnnnnnnnnnnnnnnnnnnnnnnnnnnnnnnnnnnnnnnnnnnnnnnnnnnnnnnnnnnnnnnnnnnnnnnnnnnnnnnnnnnnnnnnnnnnnnnnnnnnnnnnnnnnnnnnnnnnnnnnnnnnnnnnnnnnnnnnnnnnnnnnnnnnnnnnnnnnnnnnnnnnnnnnnnnnnnnnnnnnnnnnnnnnnnnnnnnnnnnnnnnnnnnnnnnnnnnnnnnnnnnnnnnnnnnnnnnnnnnnnnnnnnnnnnnnnnnnnnnnnnnnnnnnnnnnnnnnnnnnnnnnnnnnnnnnnnnnnnnnnnnnnnnnnnnnnnnnnnnnnnnnnnnnnnnnnnnnnnnnnnnnnnnnnnnnnnnnnnnnnnnnnnnnnnnnnnnnnnnnnnnnnnnnnnnnnnnnnnnnnnnnnnnnnnnnnnnnnnnnnnnnnnnnnnnnnnnnnnnnnnnnnnnnnnnnnnnnnnnnnnnnnnnnnnnnnnnnnnnnnnnnnnnnnnnnnnnnnnnnnnnnnnnnnnnnnnnnnnnnnnnnnnnnnnnnnnnnnnnnnnnnnnnnnnnnnnnnnnnnnnnnnnnnnnnnnnnnnnnnnnnnnnnnnnnnnnnnnnnnnnnnnnnnnnnnnnnnnnnnnnnnnnnnnnnnnnnnnnnnnnnnnnnnnnnnnnnnnnnnnnnnnnnnnnnnnnnnnnnnnnnnnnnnnnnnnnnnnnnnnnnnnnnnnnnnnnnnnnnnnnnnnnnnnnnnnnnnnnnnnnnnnnnnnnnnnnnnnnnnnnnnnnnnnnnnnnnnnnnnnnnnnnnnnnnnnnnnnnnnnnnnnnnnnnnnnnnnnnnnnnnnnnnnnnnnnnnnnnnnnnnnnnnnnnnnnnnnnnnnnnnnnnnnnnnnnnnnnnnnnnnnnnnnnnnnnnnnnnnnnnnnnnnnnnnnnnnnnnnnnnnnnnnnnnnnnnnnnnnnnnnnnnnnnnnnnnnnnnnnnnnnnnnnnnnnnnnnnnnnnnnnnnnnnnnnnnnnnnnnnnnnnnnnnnnnnnnnnnnnnnnnnnnnnnnnnnnnnnnnnnnnnnnnnnnnnnnnnnnnnnnnnnnnnnnnnnnnnnnnnnnnnnnnnnnnnnnnnnnnnnnnnnnnnnnnnnnnnnnnnnnnnnnnnnnnnnnnnnnnnnnnnnnnnnnnnnnnnnnnnnnnnnnnnnnnnnnnnnnnnnnnnnnnnnnnnnnnnnnnnnnnnnnnnnnnnnnnnnnnnnnnnnnnnnnnnnnnnnnnnnnnnnnnnnnnnnnnnnnnnnnnnnnnnnnnnnnnnnnnnnnnnnnnnnnnnnnnnnnnnnnnnnnnnnnnnnnnnnnnnnnnnnnnnnnnnnnnnnnnnnnnnnnnnnnnnnnnnnnnnnnnnnnnnnnnnnnnnnnnnnnnnnnnnnnnnnnnnnnnnnnnnnnnnnnnnnnnnnnnnnnnnnnnnnnnnnnnnnnnnnnnnnnnnnnnnnnnnnnnnnnnnnnnnnnnnnnnnnnnnnnnnnnnnnnnnnnnnnnnnnnnnnnnnnnnnnnnnnnnnnnnnnnnnnnnnnnnnnnnnnnnnnnnnnnnnnnnnnnnnnnnnnnnnnnnnnnnnnnnnnnnnnnnnnnnnnnnnnnnnnnnnnnnnnnnnnnnnnnnnnnnnnnnnnnnnnnnnnnnnnnnnnnnnnnnnnnnnnnnnnnnnnnnnnnnnnnnnnnnnnnnnnnnnnnnnnnnnnnnnnnnnnnnnnnnnnnnnnnnnnnnnnnnnnnnnnnnnnnnnnnnnnnnnnnnnnnnnnnnnnnnnnnnnnnnnnnnnnnnnnnnnnnnnnnnnnnnnnnnnnnnnnnnnnnnnnnnnnnnnnnnnnnnnnnnnnnnnnnnnnnnnnnnnnnnnnnnnnnnnnnnnnnnnnnnnnnnnnnnnnnnnnnnnnnnnnnnnnnnnnnnnnnnnnnnnnnnnnnnnnnnnnnnnnnnnnnnnnnnnnnnnnnnnnnnnnnnnnnnnnnnnnnnnnnnnnnnnnnnnnnnnnnnnnnnnnnnnnnnnnnnnnnnnnnnnnnnnnnnnnnnnnnnnnnnnnnnnnnnnnnnnnnnnnnnnnnnnnnnnnnnnnnnnnnnnnnnnnnnnnnnnnnnnnnnnnnnnnnnnnnnnnnnnnnnnnnnnnnnnnnnnnnnnnnnnnnnnnnnnnnnnnnnnnnnnnnnnnnnnnnnnnnnnnnnnnnnnnnnnnnnnnnnnnnnnnnnnnnnnnnnnnnnnnnnnnnnnnnnnnnnnnnnnnnnnnnnnnnnnnnnnnnnnnnnnnnnnnnnnnnnnnnnnnnnnnnnnnnnnnnnnnnnnnnnnnnnnnnnnnnnnnnnnnnnnnnnnnnnnnnnnnnnnnnnnnnnnnnnnnnnnnnnnnnnnnnnnnnnnnnnnnnnnnnnnnnnnnnnnnnnnnnnnnnnnnnnnnnnnnnnnnnnnnnnnnnnnnnnnnnnnnnnnnnnnnnnnnnnnnnnnnnnnnnnnnnnnnnnnnnnnnnnnnnnnnnnnnnnnnnnnnnnnnnnnnnnnnnnnnnnnnnnnnnnnnnnnnnnnnnnnnnnnnnnnnnnnnnnnnnnnnnnnnnnnnnnnnnnnnnnnnnnnnnnnnnnnnnnnnnnnnnnnnnnnnnnnnnnnnnnnnnnnnnnnnnnnnnnnnnnnnnnnnnnnnnnnnnnnnnnnnnnnnnnnnnnnnnnnnnnnnnnnnnnnnnnnnnnnnnnnnnnnnnnnnnnnnnnnnnnnnnnnnnnnnnnnnnnnnnnnnnnnnnnnnnnnnnnnnnnnnnnnnnnnnnnnnnnnnnnnnnnnnnnnnnnnnnnnnnnnnnnnnnnnnnnnnnnnnnnnnnnnnnnnnnnnnnnnnnnnnnnnnnnnnnnnnnnnnnnnnnnnnnnnnnnnnnnnnnnnnnnnnnnnnnnnnnnnnnnnnnnnnnnnnnnnnnnnnnnnnnnnnnnnnnnnnnnnnnnnnnnnnnnnnnnnnnnnnnnnnnnnnnnnnnnnnnnnnnnnnnnnnnnnnnnnnnnnnnnnnnnnnnnnnnnnnnnnnnnnnnnnnnnnnnnnnnnnnnnnnnnnnnnnnnnnnnnnnnnnnnnnnnnnnnnnnnnnnnnnnnnnnnnnnnnnnnnnnnnnnnnnnnnnnnnnnnnnnnnnnnnnnnnnnnnnnnnnnnnnnnnnnnnnnnnnnnnnnnnnnnnnnnnnnnnnnnnnnnnnnnnnnnnnnnnnnnnnnnnnnnnnnnnnnnnnnnnnnnnnnnnnnnnnnnnnnnnnnnnnnnnnnnnnnnnnnnnnnnnnnnnnnnnnnnnnnnnnnnnnnnnnnnnnnnnnnnnnnnnnnnnnnnnnnnnnnnnnnnnnnnnnnnnnnnnnnnnnnnnnnnnnnnnnnnnnnnnnnnnnnnnnnnnnnnnnnnnnnnnnnnnnnnnnnnnnnnnnnnnnnnnnnnnnnnnnnnnnnnnnnnnnnnnnnnnnnnnnnnnnnnnnnnnnnnnnnnnnnnnnnnnnnnnnnnnnnnnnnnnnnnnnnnnnnnnnnnnnnnnnnnnnnnnnnnnnnnnnnnnnnnnnnnnnnnnnnnnnnnnnnnnnnnnnnnnnnnnnnnnnnnnnnnnnnnnnnnnnnnnnnnnnnnnnnnnnnnnnnnnnnnnnnnnnnnnnnnnnnnnnnnnnnnnnnnnnnnnnnnnnnnnnnnnnnnnnnnnnnnnnnnnnnnnnnnnnnnnnnnnnnnnnnnnnnnnnnnnnnnnnnnnnnnnnnnnnnnnnnnnnnnnnnnnnnnnnnnnnnnnnnnnnnnnnnnnnnnnnnnnnnnnnnnnnnnnnnnnnnnnnnnnnnnnnnnnnnnnnnnnnnnnnnnnnnnnnnnnnnnnnnnnnnnnnnnnnnnnnnnnnnnnnnnnnnnnnnnnnnnnnnnnnnnnnnnnnnnnnnnnnnnnnnnnnnnnnnnnnnnnnnnnnnnnnnnnnnnnnnnnnnnnnnnnnnnnnnnnnnnnnnnnnnnnnnnnnnnnnnnnnnnnnnnnnnnnnnnnnnnnnnnnnnnnnnnnnnnnnnnnnnnnnnnnnnnnnnnnnnnnnnnnnnnnnnnnnnnnnnnnnnnnnnnnnnnnnnnnnnnnnnnnnnnnnnnnnnnnnnnnnnnnnnnnnnnnnnnnnnnnnnnnnnnnnnnnnnnnnnnnnnnnnnnnnnnnnnnnnnnnnnnnnnnnnnnnnnnnnnnnnnnnnnnnnnnnnnnnnnnnnnnnnnnnnnnnnnnnnnnnnnnnnnnnnnnnnnnnnnnnnnnnnnnnnnnnnnnnnnnnnnnnnnnnnnnnnnnnnnnnnnnnnnnnnnnnnnnnnnnnnnnnnnnnnnnnnnnnnnnnnnnnnnnnnnnnnnnnnnnnnnnnnnnnnnnnnnnnnnnnnnnnnnnnnnnnnnnnnnnnnnnnnnnnnnnnnnnnnnnnnnnnnnnnnnnnnnnnnnnnnnnnnnnnnnnnnnnnnnnnnnnnnnnnnnnnnnnnnnnnnnnnnnnnnnnnnnnnnnnnnnnnnnnnnnnnnnnnnnnnnnnnnnnnnnnnnnnnnnnnnnnnnnnnnnnnnnnnnnnnnnnnnnnnnnnnnnnnnnnnnnnnnnnnnnnnnnnnnnnnnnnnnnnnnnnnnnnnnnnnnnnnnnnnnnnnnnnnnnnnnnnnnnnnnnnnnnnnnnnnnnnnnnnnnnnnnnnnnnnnnnnnnnnnnnnnnnnnnnnnnnnnnnnnnnnnnnnnnnnnnnnnnnnnnnnnnnnnnnnnnnnnnnnnnnnnnnnnnnnnnnnnnnnnnnnnnnnnnnnnnnnnnnnnnnnnnnnnnnnnnnnnnnnnnnnnnnnnnnnnnnnnnnnnnnnnnnnnnnnnnnnnnnnnnnnnnnnnnnnnnnnnnnnnnnnnnnnnnnnnnnnnnnnnnnnnnnnnnnnnnnnnnnnnnnnnnnnnnnnnnnnnnnnnnnnnnnnnnnnnnnnnnnnnnnnnnnnnnnnnnnnnnnnnnnnnnnnnnnnnnnnnnnnnnnnnnnnnnnnnnnnnnnnnnnnnnnnnnnnnnnnnnnnnnnnnnnnnnnnnnnnnnnnnnnnnnnnnnnnnnnnnnnnnnnnnnnnnnnnnnnnnnnnnnnnnnnnnnnnnnnnnnnnnnnnnnnnnnnnnnnnnnnnnnnnnnnnnnnnnnnnnnnnnnnnnnnnnnnnnnnnnnnnnnnnnnnnnnnnnnnnnnnnnnnnnnnnnnnnnnnnnnnnnnnnnnnnnnnnnnnnnnnnnnnnnnnnnnnnnnnnnnnnnnnnnnnnnnnnnnnnnnnnnnnnnnnnnnnnnnnnnnnnnnnnnnnnnnnnnnnnnnnnnnnnnnnnnnnnnnnnnnnnnnnnnnnnnnnnnnnnnnnnnnnnnnnnnnnnnnnnnnnnnnnnnnnnnnnnnnnnnnnnnnnnnnnnnnnnnnnnnnnnnnnnnnnnnnnnnnnnnnnnnnnnnnnnnnnnnnnnnnnnnnnnnnnnnnnnnnnnnnnnnnnnnnnnnnnnnnnnnnnnnnnnnnnnnnnnnnnnnnnnnnnnnnnnnnnnnnnnnnnnnnnnnnnnnnnnnnnnnnnnnnnnnnnnnnnnnnnnnnnnnnnnnnnnnnnnnnnnnnnnnnnnnnnnnnnnnnnnnnnnnnnnnnnnnnnnnnnnnnnnnnnnnnnnnnnnnnnnnnnnnnnnnnnnnnnnnnnnnnnnnnnnnnnnnnnnnnnnnnnnnnnnnnnnnnnnnnnnnnnnnnnnnnnnnnnnnnnnnnnnnnnnnnnnnnnnnnnnnnnnnnnnnnnnnnnnnnnnnnnnnnnnnnnnnnnnnnnnnnnnnnnnnnnnnnnnnnnnnnnnnnnnnnnnnnnnnnnnnnnnnnnnnnnnnnnnnnnnnnnnnnnnnnnnnnnnnnnnnnnnnnnnnnnnnnnnnnnnnnnnnnnnnnnnnnnnnnnnnnnnnnnnnnnnnnnnnnnnnnnnnnnnnnnnnnnnnnnnnnnnnnnnnnnnnnnnnnnnnnnnnnnnnnnnnnnnnnnnnnnnnnnnnnnnnnnnnnnnnnnnnnnnnnnnnnnnnnnnnnnnnnnnnnnnnnnnnnnnnnnnnnnnnnnnnnnnnnnnnnnnnnnnnnnnnnnnnnnnnnnnnnnnnnnnnnnnnnnnnnnnnnnnnnnnnnnnnnnnnnnnnnnnnnnnnnnnnnnnnnnnnnnnnnnnnnnnnnnnnnnnnnnnnnnnnnnnnnnnnnnnnnnnnnnnnnnnnnnnnnnnnnnnnnnnnnnnnnnnnnnnnnnnnnnnnnnnnnnnnnnnnnnnnnnnnnnnnnnnnnnnnnnnnnnnnnnnnnnnnnnnnnnnnnnnnnnnnnnnnnnnnnnnnnnnnnnnnnnnnnnnnnnnnnnnnnnnnnnnnnnnnnnnnnnnnnnnnnnnnnnnnnnnnnnnnnnnnnnnnnnnnnnnnnnnnnnnnnnnnnnnnnnnnnnnnnnnnnnnnnnnnnnnnnnnnnnnnnnnnnnnnnnnnnnnnnnnnnnnnnnnnnnnnnnnnnnnnnnnnnnnnnnnnnnnnnnnnnnnnnnnnnnnnnnnnnnnnnnnnnnnnnnnnnnnnnnnnnnnnnnnnnnnnnnnnnnnnnnnnnnnnnnnnnnnnnnnnnnnnnnnnnnnnnnnnnnnnnnnnnnnnnnnnnnnnnnnnnnnnnnnnnnnnnnnnnnnnnnnnnnnnnnnnnnnnnnnnnnnnnnnnnnnnnnnnnnnnnnnnnnnnnnnnnnnnnnnnnnnnnnnnnnnnnnnnnnnnnnnnnnnnnnnnnnnnnnnnnnnnnnnnnnnnnnnnnnnnnnnnnnnnnnnnnnnnnnnnnnnnnnnnnnnnnnnnnnnnnnnnnnnnnnnnnnnnnnnnnnnnnnnnnnnnnnnnnnnnnnnnnnnnnnnnnnnnnnnnnnnnnnnnnnnnnnnnnnnnnnnnnnnnnnnnnnnnnnnnnnnnnnnnnnnnnnnnnnnnnnnnnnnnnnnnnnnnnnnnnnnnnnnnnnnnnnnnnnnnnnnnnnnnnnnnnnnnnnnnnnnnnnnnnnnnnnnnnnnnnnnnnnnnnnnnnnnnnnnnnnnnnnnnnnnnnnnnnnnnnnnnnnnnnnnnnnnnnnnnnnnnnnnnnnnnnnnnnnnnnnnnnnnnnnnnnnnnnnnnnnnnnnnnnnnnnnnnnnnnnnnnnnnnnnnnnnnnnnnnnnnnnnnnnnnnnnnnnnnnnnnnnnnnnnnnnnnnnnnnnnnnnnnnnnnnnnnnnnnnnnnnnnnnnnnnnnnnnnnnnnnnnnnnnnnnnnnnnnnnnnnnnnnnnnnnnnnnnnnnnnnnnnnnnnnnnnnnnnnnnnnnnnnnnnnnnnnnnnnnnnnnnnnnnnnnnnnnnnnnnnnnnnnnnnnnnnnnnnnnnnnnnnnnnnnnnnnnnnnnnnnnnnnnnnnnnnnnnnnnnnnnnnnnnnnnnnnnnnnnnnnnnnnnnnnnnnnnnnnnnnnnnnnnnnnnnnnnnnnnnnnnnnnnnnnnnnnnnnnnnnnnnnnnnnnnnnnnnnnnnnnnnnnnnnnnnnnnnnnnnnnnnnnnnnnnnnnnnnnnnnnnnnnnnnnnnnnnnnnnnnnnnnnnnnnnnnnnnnnnnnnnnnnnnnnnnnnnnnnnnnnnnnnnnnnnnnnnnnnnnnnnnnnnnnnnnnnnnnnnnnnnnnnnnnnnnnnnnnnnnnnnnnnnnnnnnnnnnnnnnnnnnnnnnnnnnnnnnnnnnnnnnnnnnnnnnnnnnnnnnnnnnnnnnnnnnnnnnnnnnnnnnnnnnnnnnnnnnnnnnnnnnnnnnnnnnnnnnnnnnnnnnnnnnnnnnnnnnnnnnnnnnnnnnnnnnnnnnnnnnnnnnnnnnnnnnnnnnnnnnnnnnnnnnnnnnnnnnnnnnnnnnnnnnnnnnnnnnnnnnnnnnnnnnnnnnnnnnnnnnnnnnnnnnnnnnnnnnnnnnnnnnnnnnnnnnnnnnnnnnnnnnnnnnnnnnnnnnnnnnnnnnnnnnnnnnnnnnnnnnnnnnnnnnnnnnnnnnnnnnnnnnnnnnnnnnnnnnnnnnnnnnnnnnnnnnnnnnnnnnnnnnnnnnnnnnnnnnnnnnnnnnnnnnnnnnnnnnnnnnnnnnnnnnnnnnnnnnnnnnnnnnnnnnnnnnnnnnnnnnnnnnnnnnnnnnnnnnnnnnnnnnnnnnnnnnnnnnnnnnnnnnnnnnnnnnnnnnnnnnnnnnnnnnnnnnnnnnnnnnnnnnnnnnnnnnnnnnnnnnnnnnnnnnnnnnnnnnnnnnnnnnnnnnnnnnnnnnnnnnnnnnnnnnnnnnnnnnnnnnnnnnnnnnnnnnnnnnnnnnnnnnnnnnnnnnnnnnnnnnnnnnnnnnnnnnnnnnnnnnnnnnnnnnnnnnnnnnnnnnnnnnnnnnnnnnnnnnnnnnnnnnnnnnnnnnnnnnnnnnnnnnnnnnnnnnnnnnnnnnnnnnnnnnnnnnnnnnnnnnnnnnnnnnnnnnnnnnnnnnnnnnnnnnnnnnnnnnnnnnnnnnnnnnnnnnnnnnnnnnnnnnnnnnnnnnnnnnnnnnnnnnnnnnnnnnnnnnnnnnnnnnnnnnnnnnnnnnnnnnnnnnnnnnnnnnnnnnnnnnnnnnnnnnnnnnnnnnnnnnnnnnnnnnnnnnnnnnnnnnnnnnnnnnnnnnnnnnnnnnnnnnnnnnnnnnnnnnnnnnnnnnnnnnnnnnnnnnnnnnnnnnnnnnnnnnnnnnnnnnnnnnnnnnnnnnnnnnnnnnnnnnnnnnnnnnnnnnnnnnnnnnnnnnnnnnnnnnnnnnnnnnnnnnnnnnnnnnnnnnnnnnnnnnnnnnnnnnnnnnnnnnnnnnnnnnnnnnnnnnnnnnnnnnnnnnnnnnnnnnnnnnnnnnnnnnnnnnnnnnnnnnnnnnnnnnnnnnnnnnnnnnnnnnnnnnnnnnnnnnnnnnnnnnnnnnnnnnnnnnnnnnnnnnnnnnnnnnnnnnnnnnnnnnnnnnnnnnnnnnnnnnnnnnnnnnnnnnnnnnnnnnnnnnnnnnnnnnnnnnnnnnnnnnnnnnnnnnnnnnnnnnnnnnnnnnnnnnnnnnnnnnnnnnnnnnnnnnnnnnnnnnnnnnnnnnnnnnnnnnnnnnnnnnnnnnnnnnnnnnnnnnnnnnnnnnnnnnnnnnnnnnnnnnnnnnnnnnnnnnnnnnnnnnnnnnnnnnnnnnnnnnnnnnnnnnnnnnnnnnnnnnnnnnnnnnnnnnnnnnnnnnnnnnnnnnnnnnnnnnnnnnnnnnnnnnnnnnnnnnnnnnnnnnnnnnnnnnnnnnnnnnnnnnnnnnnnnnnnnnnnnnnnnnnnnnnnnnnnnnnnnnnnnnnnnnnnnnnnnnnnnnnnnnnnnnnnnnnnnnnnnnnnnnnnnnnnnnnnnnnnnnnnnnnnnnnnnnnnnnnnnnnnnnnnnnnnnnnnnnnnnnnnnnnnnnnnnnnnnnnnnnnnnnnnnnnnnnnnnnnnnnnnnnnnnnnnnnnnnnnnnnnnnnnnnnnnnnnnnnnnnnnnnnnnnnnnnnnnnnnnnnnnnnnnnnnnnnnnnnnnnnnnnnnnnnnnnnnnnnnnnnnnnnnnnnnnnnnnnnnnnnnnnnnnnnnnnnnnnnnnnnnnnnnnnnnnnnnnnnnnnnnnnnnnnnnnnnnnnnnnnnnnnnnnnnnnnnnnnnnnnnnnnnnnnnnnnnnnnnnnnnnnnnnnnnnnnnnnnnnnnnnnnnnnnnnnnnnnnnnnnnnnnnnnnnnnnnnnnnnnnnnnnnnnnnnnnnnnnnnnnnnnnnnnnnnnnnnnnnnnnnnnnnnnnnnnnnnnnnnnnnnnnnnnnnnnnnnnnnnnnnnnnnnnnnnnnnnnnnnnnnnnnnnnnnnnnnnnnnnnnnnnnnnnnnnnnnnnnnnnnnnnnnnnnnnnnnnnnnnnnnnnnnnnnnnnnnnnnnnnnnnnnnnnnnnnnnnnnnnnnnnnnnnnnnnnnnnnnnnnnnnnnnnnnnnnnnnnnnnnnnnnnnnnnnnnnnnnnnnnnnnnnnnnnnnnnnnnnnnnnnnnnnnnnnnnnnnnnnnnnnnnnnnnnnnnnnnnnnnnnnnnnnnnnnnnnnnnnnnnnnnnnnnnnnnnnnnnnnnnnnnnnnnnnnnnnnnnnnnnnnnnnnnnnnnnnnnnnnnnnnnnnnnnnnnnnnnnnnnnnnnnnnnnnnnnnnnnnnnnnnnnnnnnnnnnnnnnnnnnnnnnnnnnnnnnnnnnnnnnnnnnnnnnnnnnnnnnnnnnnnnnnnnnnnnnnnnnnnnnnnnnnnnnnnnnnnnnnnnnnnnnnnnnnnnnnnnnnnnnnnnnnnnnnnnnnnnnnnnnnnnnnnnnnnnnnnnnnnnnnnnnnnnnnnnnnnnnnnnnnnnnnnnnnnnnnnnnnnnnnnnnnnnnnnnnnnnnnnnnnnnnnnnnnnnnnnnnnnnnnnnnnnnnnnnnnnnnnnnnnnnnnnnnnnnnnnnnnnnnnnnnnnnnnnnnnnnnnnnnnnnnnnnnnnnnnnnnnnnnnnnnnnnnnnnnnnnnnnnnnnnnnnnnnnnnnnnnnnnnnnnnnnnnnnnnnnnnnnnnnnnnnnnnnnnnnnnnnnnnnnnnnnnnnnnnnnnnnnnnnnnnnnnnnnnnnnnnnnnnnnnnnnnnnnnnnnnnnnnnnnnnnnnnnnnnnnnnnnnnnnnnnnnnnnnnnnnnnnnnnnnnnnnnnnnnnnnnnnnnnnnnnnnnnnnnnnnnnnnnnnnnnnnnnnnnnnnnnnnnnnnnnnnnnnnnnnnnnnnnnnnnnnnnnnnnnnnnnnnnnnnnnnnnnnnnnnnnnnnnnnnnnnnnnnnnnnnnnnnnnnnnnnnnnnnnnnnnnnnnnnnnnnnnnnnnnnnnnnnnnnnnnnnnnnnnnnnnnnnnnnnnnnnnnnnnnnnnnnnnnnnnnnnnnnnnnnnnnnnnnnnnnnnnnnnnnnnnnnnnnnnnnnnnnnnnnnnnnnnnnnnnnnnnnnnnnnnnnnnnnnnnnnnnnnnnnnnnnnnnnnnnnnnnnnnnnnnnnnnnnnnnnnnnnnnnnnnnnnnnnnnnnnnnnnnnnnnnnnnnnnnnnnnnnnnnnnnnnnnnnnnnnnnnnnnnnnnnnnnnnnnnnnnnnnnnnnnnnnnnnnnnnnnnnnnnnnnnnnnnnnnnnnnnnnnnnnnnnnnnnnnnnnnnnnnnnnnnnnnnnnnnnnnnnnnnnnnnnnnnnnnnnnnnnnnnnnnnnnnnnnnnnnnnnnnnnnnnnnnnnnnnnnnnnnnnnnnnnnnnnnnnnnnnnnnnnnnnnnnnnnnnnnnnnnnnnnnnnnnnnnnnnnnnnnnnnnnnnnnnnnnnnnnnnnnnnnnnnnnnnnnnnnnnnnnnnnnnnnnnnnnnnnnnnnnnnnnnnnnnnnnnnnnnnnnnnnnnnnnnnnnnnnnnnnnnnnnnnnnnnnnnnnnnnnnnnnnnnnnnnnnnnnnnnnnnnnnnnnnnnnnnnnnnnnnnnnnnnnnnnnnnnnnnnnnnnnnnnnnnnnnnnnnnnnnnnnnnnnnnnnnnnnnnnnnnnnnnnnnnnnnnnnnnnnnnnnnnnnnnnnnnnnnnnnnnnnnnnnnnnnnnnnnnnnnnnnnnnnnnnnnnnnnnnnnnnnnnnnnnnnnnnnnnnnnnnnnnnnnnnnnnnnnnnnnnnnnnnnnnnnnnnnnnnnnnnnnnnnnnnnnnnnnnnnnnnnnnnnnnnnnnnnnnnnnnnnnnnnnnnnnnnnnnnnnnnnnnnnnnnnnnnnnnnnnnnnnnnnnnnnnnnnnnnnnnnnnnnnnnnnnnnnnnnnnnnnnnnnnnnnnnnnnnnnnnnnnnnnnnnnnnnnnnnnnnnnnnnnnnnnnnnnnnnnnnnnnnnnnnnnnnnnnnnnnnnnnnnnnnnnnnnnnnnnnnnnnnnnnnnnnnnnnnnnnnnnnnnnnnnnnnnnnnnnnnnnnnnnnnnnnnnnnnnnnnnnnnnnnnnnnnnnnnnnnnnnnnnnnnnnnnnnnnnnnnnnnnnnnnnnnnnnnnnnnnnnnnnnnnnnnnnnnnnnnnnnnnnnnnnnnnnnnnnnnnnnnnnnnnnnnnnnnnnnnnnnnnnnnnnnnnnnnnnnnnnnnnnnnnnnnnnnnnnnnnnnnnnnnnnnnnnnnnnnnnnnnnnnnnnnnnnnnnnnnnnnnnnnnnnnnnnnnnnnnnnnnnnnnnnnnnnnnnnnnnnnnnnnnnnnnnnnnnnnnnnnnnnnnnnnnnnnnnnnnnnnnnnnnnnnnnnnnnnnnnnnnnnnnnnnnnnnnnnnnnnnnnnnnnnnnnnnnnnnnnnnnnnnnnnnnnnnnnnnnnnnnnnnnnnnnnnnnnnnnnnnnnnnnnnnnnnnnnnnnnnnnnnnnnnnnnnnnnnnnnnnnnnnnnnnnnnnnnnnnnnnnnnnnnnnnnnnnnnnnnnnnnnnnnnnnnnnnnnnnnnnnnnnnnnnnnnnnnnnnnnnnnnnnnnnnnnnnnnnnnnnnnnnnnnnnnnnnnnnnnnnnnnnnnnnnnnnnnnnnnnnnnnnnnnnnnnnnnnnnnnnnnnnnnnnnnnnnnnnnnnnnnnnnnnnnnnnnnnnnnnnnnnnnnnnnnnnnnnnnnnnnnnnnnnnnnnnnnnnnnnnnnnnnnnnnnnnnnnnnnnnnnnnnnnnnnnnnnnnnnnnnnnnnnnnnnnnnnnnnnnnnnnnnnnnnnnnnnnnnnnnnnnnnnnnnnnnnnnnnnnnnnnnnnnnnnnnnnnnnnnnnnnnnnnnnnnnnnnnnnnnnnnnnnnnnnnnnnnnnnnnnnnnnnnnnnnnnnnnnnnnnnnnnnnnnnnnnnnnnnnnnnnnnnnnnnnnnnnnnnnnnnnnnnnnnnnnnnnnnnnnnnnnnnnnnnnnnnnnnnnnnnnnnnnnnnnnnnnnnnnnnnnnnnnnnnnnnnnnnnnnnnnnnnnnnnnnnnnnnnnnnnnnnnnnnnnnnnnnnnnnnnnnnnnnnnnnnnnnnnnnnnnnnnnnnnnnnnnnnnnnnnnnnnnnnnnnnnnnnnnnnnnnnnnnnnnnnnnnnnnnnnnnnnnnnnnnnnnnnnnnnnnnnnnnnnnnnnnnnnnnnnnnnnnnnnnnnnnnnnnnnnnnnnnnnnnnnnnnnnnnnnnnnnnnnnnnnnnnnnnnnnnnnnnnnnnnnnnnnnnnnnnnnnnnnnnnnnnnnnnnnnnnnnnnnnnnnnnnnnnnnnnnnnnnnnnnnnnnnnnnnnnnnnnnnnnnnnnnnnnnnnnnnnnnnnnnnnnnnnnnnnnnnnnnnnnnnnnnnnnnnnnnnnnnnnnnnnnnnnnnnnnnnnnnnnnnnnnnnnnnnnnnnnnnnnnnnnnnnnnnnnnnnnnnnnnnnnnnnnnnnnnnnnnnnnnnnnnnnnnnnnnnnnnnnnnnnnnnnnnnnnnnnnnnnnnnnnnnnnnnnnnnnnnnnnnnnnnnnnnnnnnnnnnnnnnnnnnnnnnnnnnnnnnnnnnnnnnnnnnnnnnnnnnnnnnnnnnnnnnnnnnnnnnnnnnnnnnnnnnnnnnnnnnnnnnnnnnnnnnnnnnnnnnnnnnnnnnnnnnnnnnnnnnnnnnnnnnnnnnnnnnnnnnnnnnnnnnnnnnnnnnnnnnnnnnnnnnnnnnnnnnnnnnnnnnnnnnnnnnnnnnnnnnnnnnnnnnnnnnnnnnnnnnnnnnnnnnnnnnnnnnnnnnnnnnnnnnnnnnnnnnnnnnnnnnnnnnnnnnnnnnnnnnnnnnnnnnnnnnnnnnnnnnnnnnnnnnnnnnnnnnnnnnnnnnnnnnnnnnnnnnnnnnnnnnnnnnnnnnnnnnnnnnnnnnnnnnnnnnnnnnnnnnnnnnnnnnnnnnnnnnnnnnnnnnnnnnnnnnnnnnnnnnnnnnnnnnnnnnnnnnnnnnnnnnnnnnnnnnnnnnnnnnnnnnnnnnnnnnnnnnnnnnnnnnnnnnnnnnnnnnnnnnnnnnnnnnnnnnnnnnnnnnnnnnnnnnnnnnnnnnnnnnnnnnnnnnnnnnnnnnnnnnnnnnnnnnnnnnnnnnnnnnnnnnnnnnnnnnnnnnnnnnnnnnnnnnnnnnnnnnnnnnnnnnnnnnnnnnnnnnnnnnnnnnnnnnnnnnnnnnnnnnnnnnnnnnnnnnnnnnnnnnnnnnnnnnnnnnnnnnnnnnnnnnnnnnnnnnnnnnnnnnnnnnnnnnnnnnnnnnnnnnnnnnnnnnnnnnnnnnnnnnnnnnnnnnnnnnnnnnnnnnnnnnnnnnnnnnnnnnnnnnnnnnnnnnnnnnnnnnnnnnnnnnnnnnnnnnnnnnnnnnnnnnnnnnnnnnnnnnnnnnnnnnnnnnnnnnnnnnnnnnnnnnnnnnnnnnnnnnnnnnnnnnnnnnnnnnnnnnnnnnnnnnnnnnnnnnnnnnnnnnnnnnnnnnnnnnnnnnnnnnnnnnnnnnnnnnnnnnnnnnnnnnnnnnnnnnnnnnnnnnnnnnnnnnnnnnnnnnnnnnnnnnnnnnnnnnnnnnnnnnnnnnnnnnnnnnnnnnnnnnnnnnnnnnnnnnnnnnnnnnnnnnnnnnnnnnnnnnnnnnnnnnnnnnnnnnnnnnnnnnnnnnnnnnnnnnnnnnnnnnnnnnnnnnnnnnnnnnnnnnnnnnnnnnnnnnnnnnnnnnnnnnnnnnnnnnnnnnnnnnnnnnnnnnnnnnnnnnnnnnnnnnnnnnnnnnnnnnnnnnnnnnnnnnnnnnnnnnnnnnnnnnnnnnnnnnnnnnnnnnnnnnnnnnnnnnnnnnnnnnnnnnnnnnnnnnnnnnnnnnnnnnnnnnnnnnnnnnnnnnnnnnnnnnnnnnnnnnnnnnnnnnnnnnnnnnnnnnnnnnnnnnnnnnnnnnnnnnnnnnnnnnnnnnnnnnnnnnnnnnnnnnnnnnnnnnnnnnnnnnnnnnnnnnnnnnnnnnnnnnnnnnnnnnnnnnnnnnnnnnnnnnnnnnnnnnnnnnnnnnnnnnnnnnnnnnnnnnnnnnnnnnnnnnnnnnnnnnnnnnnnnnnnnnnnnnnnnnnnnnnnnnnnnnnnnnnnnnnnnnnnnnnnnnnnnnnnnnnnnnnnnnnnnnnnnnnnnnnnnnnnnnnnnnnnnnnnnnnnnnnnnnnnnnnnnnnnnnnnnnnnnnnnnnnnnnnnnnnnnnnnnnnnnnnnnnnnnnnnnnnnnnnnnnnnnnnnnnnnnnnnnnnnnnnnnnnnnnnnnnnnnnnnnnnnnnnnnnnnnnnnnnnnnnnnnnnnnnnnnnnnnnnnnnnnnnnnnnnnnnnnnnnnnnnnnnnnnnnnnnnnnnnnnnnnnnnnnnnnnnnnnnnnnnnnnnnnnnnnnnnnnnnnnnnnnnnnnnnnnnnnnnnnnnnnnnnnnnnnnnnnnnnnnnnnnnnnnnnnnnnnnnnnnnnnnnnnnnnnnnnnnnnnnnnnnnnnnnnnnnnnnnnnnnnnnnnnnnnnnnnnnnnnnnnnnnnnnnnnnnnnnnnnnnnnnnnnnnnnnnnnnnnnnnnnnnnnnnnnnnnnnnnnnnnnnnnnnnnnnnnnnnnnnnnnnnnnnnnnnnnnnnnnnnnnnnnnnnnnnnnnnnnnnnnnnnnnnnnnnnnnnnnnnnnnnnnnnnnnnnnnnnnnnnnnnnnnnnnnnnnnnnnnnnnnnnnnnnnnnnnnnnnnnnnnnnnnnnnnnnnnnnnnnnnnnnnnnnnnnnnnnnnnnnnnnnnnnnnnnnnnnnnnnnnnnnnnnnnnnnnnnnnnnnnnnnnnnnnnnnnnnnnnnnnnnnnnnnnnnnnnnnnnnnnnnnnnnnnnnnnnnnnnnnnnnnnnnnnnnnnnnnnnnnnnnnnnnnnnnnnnnnnnnnnnnnnnnnnnnnnnnnnnnnnnnnnnnnnnnnnnnnnnnnnnnnnnnnnnnnnnnnnnnnnnnnnnnnnnnnnnnnnnnnnnnnnnnnnnnnnnnnnnnnnnnnnnnnnnnnnnnnnnnnnnnnnnnnnnnnnnnnnnnnnnnnnnnnnnnnnnnnnnnnnnnnnnnnnnnnnnnnnnnnnnnnnnnnnnnnnnnnnnnnnnnnnnnnnnnnnnnnnnnnnnnnnnnnnnnnnnnnnnnnnnnnnnnnnnnnnnnnnnnnnnnnnnnnnnnnnnnnnnnnnnnnnnnnnnnnnnnnnnnnnnnnnnnnnnnnnnnnnnnnnnnnnnnnnnnnnnnnnnnnnnnnnnnnnnnnnnnnnnnnnnnnnnnnnnnnnnnnnnnnnnnnnnnnnnnnnnnnnnnnnnnnnnnnnnnnnnnnnnnnnnnnnnnnnnnnnnnnnnnnnnnnnnnnnnnnnnnnnnnnnnnnnnnnnnnnnnnnnnnnnnnnnnnnnnnnnnnnnnnnnnnnnnnnnnnnnnnnnnnnnnnnnnnnnnnnnnnnnnnnnnnnnnnnnnnnnnnnnnnnnnnnnnnnnnnnnnnnnnnnnnnnnnnnnnnnnnnnnnnnnnnnnnnnnnnnnnnnnnnnnnnnnnnnnnnnnnnnnnnnnnnnnnnnnnnnnnnnnnnnnnnnnnnnnnnnnnnnnnnnnnnnnnnnnnnnnnnnnnnnnnnnnnnnnnnnnnnnnnnnnnnnnnnnnnnnnnnnnnnnnnnnnnnnnnnnnnnnnnnnnnnnnnnnnnnnnnnnnnnnnnnnnnnnnnnnnnnnnnnnnnnnnnnnnnnnnnnnnnnnnnnnnnnnnnnnnnnnnnnnnnnnnnnnnnnnnnnnnnnnnnnnnnnnnnnnnnnnnnnnnnnnnnnnnnnnnnnnnnnnnnnnnnnnnnnnnnnnnnnnnnnnnnnnnnnnnnnnnnnnnnnnnnnnnnnnnnnnnnnnnnnnnnnnnnnnnnnnnnnnnnnnnnnnnnnnnnnnnnnnnnnnnnnnnnnnnnnnnnnnnnnnnnnnnnnnnnnnnnnnnnnnnnnnnnnnnnnnnnnnnnnnnnnnnnnnnnnnnnnnnnnnnnnnnnnnnnnnnnnnnnnnnnnnnnnnnnnnnnnnnnnnnnnnnnnnnnnnnnnnnnnnnnnnnnnnnnnnnnnnnnnnnnnnnnnnnnnnnnnnnnnnnnnnnnnnnnnnnnnnnnnnnnnnnnnnnnnnnnnnnnnnnnnnnnnnnnnnnnnnnnnnnnnnnnnnnnnnnnnnnnnnnnnnnnnnnnnnnnnnnnnnnnnnnnnnnnnnnnnnnnnnnnnnnnnnnnnnnnnnnnnnnnnnnnnnnnnnnnnnnnnnnnnnnnnnnnnnnnnnnnnnnnnnnnnnnnnnnnnnnnnnnnnnnnnnnnnnnnnnnnnnnnnnnnnnnnnnnnnnnnnnnnnnnnnnnnnnnnnnnnnnnnnnnnnnnnnnnnnnnnnnnnnnnnnnnnnnnnnnnnnnnnnnnnnnnnnnnnnnnnnnnnnnnnnnnnnnnnnnnnnnnnnnnnnnnnnnnnnnnnnnnnnnnnnnnnnnnnnnnnnnnnnnnnnnnnnnnnnnnnnnnnnnnnnnnnnnnnnnnnnnnnnnnnnnnnnnnnnnnnnnnnnnnnnnnnnnnnnnnnnnnnnnnnnnnnnnnnnnnnnnnnnnnnnnnnnnnnnnnnnnnnnnnnnnnnnnnnnnnnnnnnnnnnnnnnnnnnnnnnnnnnnnnnnnnnnnnnnnnnnnnnnnnnnnnnnnnnnnnnnnnnnnnnnnnnnnnnnnnnnnnnnnnnnnnnnnnnnnnnnnnnnnnnnnnnnnnnnnnnnnnnnnnnnnnnnnnnnnnnnnnnnnnnnnnnnnnnnnnnnnnnnnnnnnnnnnnnnnnnnnnnnnnnnnnnnnnnnnnnnnnnnnnnnnnnnnnnnnnnnnnnnnnnnnnnnnnnnnnnnnnnnnnnnnnnnnnnnnnnnnnnnnnnnnnnnnnnnnnnnnnnnnnnnnnnnnnnnnnnnnnnnnnnnnnnnnnnnnnnnnnnnnnnnnnnnnnnnnnnnnnnnnnnnnnnnnnnnnnnnnnnnnnnnnnnnnnnnnnnnnnnnnnnnnnnnnnnnnnnnnnnnnnnnnnnnnnnnnnnnnnnnnnnnnnnnnnnnnnnnnnnnnnnnnnnnnnnnnnnnnnnnnnnnnnnnnnnnnnnnnnnnnnnnnnnnnnnnnnnnnnnnnnnnnnnnnnnnnnnnnnnnnnnnnnnnnnnnnnnnnnnnnnnnnnnnnnnnnnnnnnnnnnnnnnnnnnnnnnnnnnnnnnnnnnnnnnnnnnnnnnnnnnnnnnnnnnnnnnnnnnnnnnnnnnnnnnnnnnnnnnnnnnnnnnnnnnnnnnnnnnnnnnnnnnnnnnnnnnnnnnnnnnnnnnnnnnnnnnnnnnnnnnnnnnnnnnnnnnnnnnnnnnnnnnnnnnnnnnnnnnnnnnnnnnnnnnnnnnnnnnnnnnnnnnnnnnnnnnnnnnnnnnnnnnnnnnnnnnnnnnnnnnnnnnnnnnnnnnnnnnnnnnnnnnnnnnnnnnnnnnnnnnnnnnnnnnnnnnnnnnnnnnnnnnnnnnnnnnnnnnnnnnnnnnnnnnnnnnnnnnnnnnnnnnnnnnnnnnnnnnnnnnnnnnnnnnnnnnnnnnnnnnnnnnnnnnnnnnnnnnnnnnnnnnnnnnnnnnnnnnnnnnnnnnnnnnnnnnnnnnnnnnnnnnnnnnnnnnnnnnnnnnnnnnnnnnnnnnnnnnnnnnnnnnnnnnnnnnnnnnnnnnnnnnnnnnnnnnnnnnnnnnnnnnnnnnnnnnnnnnnnnnnnnnnnnnnnnnnnnnnnnnnnnnnnnnnnnnnnnnnnnnnnnnnnnnnnnnnnnnnnnnnnnnnnnnnnnnnnnnnnnnnnnnnnnnnnnnnnnnnnnnnnnnnnnnnnnnnnnnnnnnnnnnnnnnnnnnnnnnnnnnnnnnnnnnnnnnnnnnnnnnnnnnnnnnnnnnnnnnnnnnnnnnnnnnnnnnnnnnnnnnnnnnnnnnnnnnnnnnnnnnnnnnnnnnnnnnnnnnnnnnnnnnnnnnnnnnnnnnnnnnnnnnnnnnnnnnnnnnnnnnnnnnnnnnnnnnnnnnnnnnnnnnnnnnnnnnnnnnnnnnnnnnnnnnnnnnnnnnnnnnnnnnnnnnnnnnnnnnnnnnnnnnnnnnnnnnnnnnnnnnnnnnnnnnnnnnnnnnnnnnnnnnnnnnnnnnnnnnnnnnnnnnnnnnnnnnnnnnnnnnnnnnnnnnnnnnnnnnnnnnnnnnnnnnnnnnnnnnnnnnnnnnnnnnnnnnnnnnnnnnnnnnnnnnnnnnnnnnnnnnnnnnnnnnnnnnnnnnnnnnnnnnnnnnnnnnnnnnnnnnnnnnnnnnnnnnnnnnnnnnnnnnnnnnnnnnnnnnnnnnnnnnnnnnnnnnnnnnnnnnnnnnnnnnnnnnnnnnnnnnnnnnnnnnnnnnnnnnnnnnnnnnnnnnnnnnnnnnnnnnnnnnnnnnnnnnnnnnnnnnnnnnnnnnnnnnnnnnnnnnnnnnnnnnnnnnnnnnnnnnnnnnnnnnnnnnnnnnnnnnnnnnnnnnnnnnnnnnnnnnnnnnnnnnnnnnnnnnnnnnnnnnnnnnnnnnnnnnnnnnnnnnnnnnnnnnnnnnnnnnnnnnnnnnnnnnnnnnnnnnnnnnnnnnnnnnnnnnnnnnnnnnnnnnnnnnnnnnnnnnnnnnnnnnnnnnnnnnnnnnnnnnnnnnnnnnnnnnnnnnnnnnnnnnnnnnnnnnnnnnnnnnnnnnnnnnnnnnnnnnnnnnnnnnnnnnnnnnnnnnnnnnnnnnnnnnnnnnnnnnnnnnnnnnnnnnnnnnnnnnnnnnnnnnnnnnnnnnnnnnnnnnnnnnnnnnnnnnnnnnnnnnnnnnnnnnnnnnnnnnnnnnnnnnnnnnnnnnnnnnnnnnnnnnnnnnnnnnnnnnnnnnnnnnnnnnnnnnnnnnnnnnnnnnnnnnnnnnnnnnnnnnnnnnnnnnnnnnnnnnnnnnnnnnnnnnnnnnnnnnnnnnnnnnnnnnnnnnnnnnnnnnnnnnnnnnnnnnnnnnnnnnnnnnnnnnnnnnnnnnnnnnnnnnnnnnnnnnnnnnnnnnnnnnnnnnnnnnnnnnnnnnnnnnnnnnnnnnnnnnnnnnnnnnnnnnnnnnnnnnnnnnnnnnnnnnnnnnnnnnnnnnnnnnnnnnnnnnnnnnnnnnnnnnnnnnnnnnnnnnnnnnnnnnnnnnnnnnnnnnnnnnnnnnnnnnnnnnnnnnnnnnnnnnnnnnnnnnnnnnnnnnnnnnnnnnnnnnnnnnnnnnnnnnnnnnnnnnnnnnnnnnnnnnnnnnnnnnnnnnnnnnnnnnnnnnnnnnnnnnnnnnnnnnnnnnnnnnnnnnnnnnnnnnnnnnnnnnnnnnnnnnnnnnnnnnnnnnnnnnnnnnnnnnnnnnnnnnnnnnnnnnnnnnnnnnnnnnnnnnnnnnnnnnnnnnnnnnnnnnnnnnnnnnnnnnnnnnnnnnnnnnnnnnnnnnnnnnnnnnnnnnnnnnnnnnnnnnnnnnnnnnnnnnnnnnnnnnnnnnnnnnnnnnnnnnnnnnnnnnnnnnnnnnnnnnnnnnnnnnnnnnnnnnnnnnnnnnnnnnnnnnnnnnnnnnnnnnnnnnnnnnnnnnnnnnnnnnnnnnnnnnnnnnnnnnnnnnnnnnnnnnnnnnnnnnnnnnnnnnnnnnnnnnnnnnnnnnnnnnnnnnnnnnnnnnnnnnnnnnnnnnnnnnnnnnnnnnnnnnnnnnnnnnnnnnnnnnnnnnnnnnnnnnnnnnnnnnnnnnnnnnnnnnnnnnnnnnnnnnnnnnnnnnnnnnnnnnnnnnnnnnnnnnnnnnnnnnnnnnnnnnnnnnnnnnnnnnnnnnnnnnnnnnnnnnnnnnnnnnnnnnnnnnnnnnnnnnnnnnnnnnnnnnnnnnnnnnnnnnnnnnnnnnnnnnnnnnnnnnnnnnnnnnnnnnnnnnnnnnnnnnnnnnnnnnnnnnnnnnnnnnnnnnnnnnnnnnnnnnnnnnnnnnnnnnnnnnnnnnnnnnnnnnnnnnnnnnnnnnnnnnnnnnnnnnnnnnnnnnnnnnnnnnnnnnnnnnnnnnnnnnnnnnnnnnnnnnnnnnnnnnnnnnnnnnnnnnnnnnnnnnnnnnnnnnnnnnnnnnnnnnnnnnnnnnnnnnnnnnnnnnnnnnnnnnnnnnnnnnnnnnnnnnnnnnnnnnnnnnnnnnnnnnnnnnnnnnnnnnnnnnnnnnnnnnnnnnnnnnnnnnnnnnnnnnnnnnnnnnnnnnnnnnnnnnnnnnnnnnnnnnnnnnnnnnnnnnnnnnnnnnnnnnnnnnnnnnnnnnnnnnnnnnnnnnnnnnnnnnnnnnnnnnnnnnnnnnnnnnnnnnnnnnnnnnnnnnnnnnnnnnnnnnnnnnnnnnnnnnnnnnnnnnnnnnnnnnnnnnnnnnnnnnnnnnnnnnnnnnnnnnnnnnnnnnnnnnnnnnnnnnnnnnnnnnnnnnnnnnnnnnnnnnnnnnnnnnnnnnnnnnnnnnnnnnnnnnnnnnnnnnnnnnnnnnnnnnnnnnnnnnnnnnnnnnnnnnnnnnnnnnnnnnnnnnnnnnnnnnnnnnnnnnnnnnnnnnnnnnnnnnnnnnnnnnnnnnnnnnnnnnnnnnnnnnnnnnnnnnnnnnnnnnnnnnnnnnnnnnnnnnnnnnnnnnnnnnnnnnnnnnnnnnnnnnnnnnnnnnnnnnnnnnnnnnnnnnnnnnnnnnnnnnnnnnnnnnnnnnnnnnnnnnnnnnnnnnnnnnnnnnnnnnnnnnnnnnnnnnnnnnnnnnnnnnnnnnnnnnnnnnnnnnnnnnnnnnnnnnnnnnnnnnnnnnnnnnnnnnnnnnnnnnnnnnnnnnnnnnnnnnnnnnnnnnnnnnnnnnnnnnnnnnnnnnnnnnnnnnnnnnnnnnnnnnnnnnnnnnnnnnnnnnnnnnnnnnnnnnnnnnnnnnnnnnnnnnnnnnnnnnnnnnnnnnnnnnnnnnnnnnnnnnnnnnnnnnnnnnnnnnnnnnnnnnnnnnnnnnnnnnnnnnnnnnnnnnnnnnnnnnnnnnnnnnnnnnnnnnnnnnnnnnnnnnnnnnnnnnnnnnnnnnnnnnnnnnnnnnnnnnnnnnnnnnnnnnnnnnnnnnnnnnnnnnnnnnnnnnnnnnnnnnnnnnnnnnnnnnnnnnnnnnnnnnnnnnnnnnnnnnnnnnnnnnnnnnnnnnnnnnnnnnnnnnnnnnnnnnnnnnnnnnnnnnnnnnnnnnnnnnnnnnnnnnnnnnnnnnnnnnnnnnnnnnnnnnnnnnnnnnnnnnnnnnnnnnnnnnnnnnnnnnnnnnnnnnnnnnnnnnnnnnnnnnnnnnnnnnnnnnnnnnnnnnnnnnnnnnnnnnnnnnnnnnnnnnnnnnnnnnnnnnnnnnnnnnnnnnnnnnnnnnnnnnnnnnnnnnnnnnnnnnnnnnnnnnnnnnnnnnnnnnnnnnnnnnnnnnnnnnnnnnnnnnnnnnnnnnnnnnnnnnnnnnnnnnnnnnnnnnnnnnnnnnnnnnnnnnnnnnnnnnnnnnnnnnnnnnnnnnnnnnnnnnnnnnnnnnnnnnnnnnnnnnnnnnnnnnnnnnnnnnnnnnnnnnnnnnnnnnnnnnnnnnnnnnnnnnnnnnnnnnnnnnnnnnnnnnnnnnnnnnnnnnnnnnnnnnnnnnnnnnnnnnnnnnnnnnnnnnnnnnnnnnnnnnnnnnnnnnnnnnnnnnnnnnnnnnnnnnnnnnnnnnnnnnnnnnnnnnnnnnnnnnnnnnnnnnnnnnnnnnnnnnnnnnnnnnnnnnnnnnnnnnnnnnnnnnnnnnnnnnnnnnnnnnnnnnnnnnnnnnnnnnnnnnnnnnnnnnnnnnnnnnnnnnnnnnnnnnnnnnnnnnnnnnnnnnnnnnnnnnnnnnnnnnnnnnnnnnnnnnnnnnnnnnnnnnnnnnnnnnnnnnnnnnnnnnnnnnnnnnnnnnnnnnnnnnnnnnnnnnnnnnnnnnnnnnnnnnnnnnnnnnnnnnnnnnnnnnnnnnnnnnnnnnnnnnnnnnnnnnnnnnnnnnnnnnnnnnnnnnnnnnnnnnnnnnnnnnnnnnnnnnnnnnnnnnnnnnnnnnnnnnnnnnnnnnnnnnnnnnnnnnnnnnnnnnnnnnnnnnnnnnnnnnnnnnnnnnnnnnnnnnnnnnnnnnnnnnnnnnnnnnnnnnnnnnnnnnnnnnnnnnnnnnnnnnnnnnnnnnnnnnnnnnnnnnnnnnnnnnnnnnnnnnnnnnnnnnnnnnnnnnnnnnnnnnnnnnnnnnnnnnnnnnnnnnnnnnnnnnnnnnnnnnnnnnnnnnnnnnnnnnnnnnnnnnnnnnnnnnnnnnnnnnnnnnnnnnnnnnnnnnnnnnnnnnnnnnnnnnnnnnnnnnnnnnnnnnnnnnnnnnnnnnnnnnnnnnnnnnnnnnnnnnnnnnnnnnnnnnnnnnnnnnnnnnnnnnnnnnnnnnnnnnnnnnnnnnnnnnnnnnnnnnnnnnnnnnnnnnnnnnnnnnnnnnnnnnnnnnnnnnnnnnnnnnnnnnnnnnnnnnnnnnnnnnnnnnnnnnnnnnnnnnnnnnnnnnnnnnnnnnnnnnnnnnnnnnnnnnnnnnnnnnnnnnnnnnnnnnnnnnnnnnnnnnnnnnnnnnnnnnnnnnnnnnnnnnnnnnnnnnnnnnnnnnnnnnnnnnnnnnnnnnnnnnnnnnnnnnnnnnnnnnnnnnnnnnnnnnnnnnnnnnnnnnnnnnnnnnnnnnnnnnnnnnnnnnnnnnnnnnnnnnnnnnnnnnnnnnnnnnnnnnnnnnnnnnnnnnnnnnnnnnnnnnnnnnnnnnnnnnnnnnnnnnnnnnnnnnnnnnnnnnnnnnnnnnnnnnnnnnnnnnnnnnnnnnnnnnnnnnnnnnnnnnnnnnnnnnnnnnnnnnnnnnnnnnnnnnnnnnnnnnnnnnnnnnnnnnnnnnnnnnnnnnnnnnnnnnnnnnnnnnnnnnnnnnnnnnnnnnnnnnnnnnnnnnnnnnnnnnnnnnnnnnnnnnnnnnnnnnnnnnnnnnnnnnnnnnnnnnnnnnnnnnnnnnnnnnnnnnnnnnnnnnnnnnnnnnnnnnnnnnnnnnnnnnnnnnnnnnnnnnnnnnnnnnnnnnnnnnnnnnnnnnnnnnnnnnnnnnnnnnnnnnnnnnnnnnnnnnnnnnnnnnnnnnnnnnnnnnnnnnnnnnnnnnnnnnnnnnnnnnnnnnnnnnnnnnnnnnnnnnnnnnnnnnnnnnnnnnnnnnnnnnnnnnnnnnnnnnnnnnnnnnnnnnnnnnnnnnnnnnnnnnnnnnnnnnnnnnnnnnnnnnnnnnnnnnnnnnnnnnnnnnnnnnnnnnnnnnnnnnnnnnnnnnnnnnnnnnnnnnnnnnnnnnnnnnnnnnnnnnnnnnnnnnnnnnnnnnnnnnnnnnnnnnnnnnnnnnnnnnnnnnnnnnnnnnnnnnnnnnnnnnnnnnnnnnnnnnnnnnnnnnnnnnnnnnnnnnnnnnnnnnnnnnnnnnnnnnnnnnnnnnnnnnnnnnnnnnnnnnnnnnnnnnnnnnnnnnnnnnnnnnnnnnnnnnnnnnnnnnnnnnnnnnnnnnnnnnnnnnnnnnnnnnnnnnnnnnnnnnnnnnnnnnnnnnnnnnnnnnnnnnnnnnnnnnnnnnnnnnnnnnnnnnnnnnnnnnnnnnnnnnnnnnnnnnnnnnnnnnnnnnnnnnnnnnnnnnnnnnnnnnnnnnnnnnnnnnnnnnnnnnnnnnnnnnnnnnnnnnnnnnnnnnnnnnnnnnnnnnnnnnnnnnnnnnnnnnnnnnnnnnnnnnnnnnnnnnnnnnnnnnnnnnnnnnnnnnnnnnnnnnnnnnnnnnnnnnnnnnnnnnnnnnnnnnnnnnnnnnnnnnnnnnnnnnnnnnnnnnnnnnnnnnnnnnnnnnnnnnnnnnnnnnnnnnnnnnnnnnnnnnnnnnnnnnnnnnnnnnnnnnnnnnnnnnnnnnnnnnnnnnnnnnnnnnnnnnnnnnnnnnnnnnnnnnnnnnnnnnnnnnnnnnnnnnnnnnnnnnnnnnnnnnnnnnnnnnnnnnnnnnnnnnnnnnnnnnnnnnnnnnnnnnnnnnnnnnnnnnnnnnnnnnnnnnnnnnnnnnnnnnnnnnnnnnnnnnnnnnnnnnnnnnnnnnnnnnnnnnnnnnnnnnnnnnnnnnnnnnnnnnnnnnnnnnnnnnnnnnnnnnnnnnnnnnnnnnnnnnnnnnnnnnnnnnnnnnnnnnnnnnnnnnnnnnnnnnnnnnnnnnnnnnnnnnnnnnnnnnnnnnnnnnnnnnnnnnnnnnnnnnnnnnnnnnnnnnnnnnnnnnnnnnnnnnnnnnnnnnnnnnnnnnnnnnnnnnnnnnnnnnnnnnnnnnnnnnnnnnnnnnnnnnnnnnnnnnnnnnnnnnnnnnnnnnnnnnnnnnnnnnnnnnnnnnnnnnnnnnnnnnnnnnnnnnnnnnnnnnnnnnnnnnnnnnnnnnnnnnnnnnnnnnnnnnnnnnnnnnnnnnnnnnnnnnnnnnnnnnnnnnnnnnnnnnnnnnnnnnnnnnnnnnnnnnnnnnnnnnnnnnnnnnnnnnnnnnnnnnnnnnnnnnnnnnnnnnnnnnnnnnnnnnnnnnnnnnnnnnnnnnnnnnnnnnnnnnnnnnnnnnnnnnnnnnnnnnnnnnnnnnnnnnnnnnnnnnnnnnnnnnnnnnnnnnnnnnnnnnnnnnnnnnnnnnnnnnnnnnnnnnnnnnnnnnnnnnnnnnnnnnnnnnnnnnnnnnnnnnnnnnnnnnnnnnnnnnnnnnnnnnnnnnnnnnnnnnnnnnnnnnnnnnnnnnnnnnnnnnnnnnnnnnnnnnnnnnnnnnnnnnnnnnnnnnnnnnnnnnnnnnnnnnnnnnnnnnnnnnnnnnnnnnnnnnnnnnnnnnnnnnnnnnnnnnnnnnnnnnnnnnnnnnnnnnnnnnnnnnnnnnnnnnnnnnnnnnnnnnnnnnnnnnnnnnnnnnnnnnnnnnnnnnnnnnnnnnnnnnnnnnnnnnnnnnnnnnnnnnnnnnnnnnnnnnnnnnnnnnnnnnnnnnnnnnnnnnnnnnnnnnnnnnnnnnnnnnnnnnnnnnnnnnnnnnnnnnnnnnnnnnnnnnnnnnnnnnnnnnnnnnnnnnnnnnnnnnnnnnnnnnnnnnnnnnnnnnnnnnnnnnnnnnnnnnnnnnnnnnnnnnnnnnnnnnnnnnnnnnnnnnnnnnnnnnnnnnnnnnnnnnnnnnnnnnnnnnnnnnnnnnnnnnnnnnnnnnnnnnnnnnnnnnnnnnnnnnnnnnnnnnnnnnnnnnnnnnnnnnnnnnnnnnnnnnnnnnnnnnnnnnnnnnnnnnnnnnnnnnnnnnnnnnnnnnnnnnnnnnnnnnnnnnnnnnnnnnnnnnnnnnnnnnnnnnnnnnnnnnnnnnnnnnnnnnnnnnnnnnnnnnnnnnnnnnnnnnnnnnnnnnnnnnnnnnnnnnnnnnnnnnnnnnnnnnnnnnnnnnnnnnnnnnnnnnnnnnnnnnnnnnnnnnnnnnnnnnnnnnnnnnnnnnnnnnnnnnnnnnnnnnnnnnnnnnnnnnnnnnnnnnnnnnnnnnnnnnnnnnnnnnnnnnnnnnnnnnnnnnnnnnnnnnnnnnnnnnnnnnnnnnnnnnnnnnnnnnnnnnnnnnnnnnnnnnnnnnnnnnnnnnnnnnnnnnnnnnnnnnnnnnnnnnnnnnnnnnnnnnnnnnnnnnnnnnnnnnnnnnnnnnnnnnnnnnnnnnnnnnnnnnnnnnnnnnnnnnnnnnnnnnnnnnnnnnnnnnnnnnnnnnnnnnnnnnnnnnnnnnnnnnnnnnnnnnnnnnnnnnnnnnnnnnnnnnnnnnnnnnnnnnnnnnnnnnnnnnnnnnnnnnnnnnnnnnnnnnnnnnnnnnnnnnnnnnnnnnnnnnnnnnnnnnnnnnnnnnnnnnnnnnnnnnnnnnnnnnnnnnnnnnnnnnnnnnnnnnnnnnnnnnnnnnnnnnnnnnnnnnnnnnnnnnnnnnnnnnnnnnnnnnnnnnnnnnnnnnnnnnnnnnnnnnnnnnnnnnnnnnnnnnnnnnnnnnnnnnnnnnnnnnnnnnnnnnnnnnnnnnnnnnnnnnnnnnnnnnnnnnnnnnnnnnnnnnnnnnnnnnnnnnnnnnnnnnnnnnnnnnnnnnnnnnnnnnnnnnnnnnnnnnnnnnnnnnnnnnnnnnnnnnnnnnnnnnnnnnnnnnnnnnnnnnnnnnnnnnnnnnnnnnnnnnnnnnnnnnnnnnnnnnnnnnnnnnnnnnnnnnnnnnnnnnnnnnnnnnnnnnnnnnnnnnnnnnnnnnnnnnnnnnnnnnnnnnnnnnnnnnnnnnnnnnnnnnnnnnnnnnnnnnnnnnnnnnnnnnnnnnnnnnnnnnnnnnnnnnnnnnnnnnnnnnnnnnnnnnnnnnnnnnnnnnnnnnnnnnnnnnnnnnnnnnnnnnnnnnnnnnnnnnnnnnnnnnnnnnnnnnnnnnnnnnnnnnnnnnnnnnnnnnnnnnnnnnnnnnnnnnnnnnnnnnnnnnnnnnnnnnnnnnnnnnnnnnnnnnnnnnnnnnnnnnnnnnnnnnnnnnnnnnnnnnnnnnnnnnnnnnnnnnnnnnnnnnnnnnnnnnnnnnnnnnnnnnnnnnnnnnnnnnnnnnnnnnnnnnnnnnnnnnnnnnnnnnnnnnnnnnnnnnnnnnnnnnnnnnnnnnnnnnnnnnnnnnnnnnnnnnnnnnnnnnnnnnnnnnnnnnnnnnnnnnnnnnnnnnnnnnnnnnnnnnnnnnnnnnnnnnnnnnnnnnnnnnnnnnnnnnnnnnnnnnnnnnnnnnnnnnnnnnnnnnnnnnnnnnnnnnnnnnnnnnnnnnnnnnnnnnnnnnnnnnnnnnnnnnnnnnnnnnnnnnnnnnnnnnnnnnnnnnnnnnnnnnnnnnnnnnnnnnnnnnnnnnnnnnnnnnnnnnnnnnnnnnnnnnnnnnnnnnnnnnnnnnnnnnnnnnnnnnnnnnnnnnnnnnnnnnnnnnnnnnnnnnnnnnnnnnnnnnnnnnnnnnnnnnnnnnnnnnnnnnnnnnnnnnnnnnnnnnnnnnnnnnnnnnnnnnnnnnnnnnnnnnnnnnnnnnnnnnnnnnnnnnnnnnnnnnnnnnnnnnnnnnnnnnnnnnnnnnnnnnnnnnnnnnnnnnnnnnnnnnnnnnnnnnnnnnnnnnnnnnnnnnnnnnnnnnnnnnnnnnnnnnnnnnnnnnnnnnnnnnnnnnnnnnnnnnnnnnnnnnnnnnnnnnnnnnnnnnnnnnnnnnnnnnnnnnnnnnnnnnnnnnnnnnnnnnnnnnnnnnnnnnnnnnnnnnnnnnnnnnnnnnnnnnnnnnnnnnnnnnnnnnnnnnnnnnnnnnnnnnnnnnnnnnnnnnnnnnnnnnnnnnnnnnnnnnnnnnnnnnnnnnnnnnnnnnnnnnnnnnnnnnnnnnnnnnnnnnnnnnnnnnnnnnnnnnnnnnnnnnnnnnnnnnnnnnnnnnnnnnnnnnnnnnnnnnnnnnnnnnnnnnnnnnnnnnnnnnnnnnnnnnnnnnnnnnnnnnnnnnnnnnnnnnnnnnnnnnnnnnnnnnnnnnnnnnnnnnnnnnnnnnnnnnnnnnnnnnnnnnnnnnnnnnnnnnnnnnnnnnnnnnnnnnnnnnnnnnnnnnnnnnnnnnnnnnnnnnnnnnnnnnnnnnnnnnnnnnnnnnnnnnnnnnnnnnnnnnnnnnnnnnnnnnnnnnnnnnnnnnnnnnnnnnnnnnnnnnnnnnnnnnnnnnnnnnnnnnnnnnnnnnnnnnnnnnnnnnnnnnnnnnnnnnnnnnnnnnnnnnnnnnnnnnnnnnnnnnnnnnnnnnnnnnnnnnnnnnnnnnnnnnnnnnnnnnnnnnnnnnnnnnnnnnnnnnnnnnnnnnnnnnnnnnnnnnnnnnnnnnnnnnnnnnnnnnnnnnnnnnnnnnnnnnnnnnnnnnnnnnnnnnnnnnnnnnnnnnnnnnnnnnnnnnnnnnnnnnnnnnnnnnnnnnnnnnnnnnnnnnnnnnnnnnnnnnnnnnnnnnnnnnnnnnnnnnnnnnnnnnnnnnnnnnnnnnnnnnnnnnnnnnnnnnnnnnnnnnnnnnnnnnnnnnnnnnnnnnnnnnnnnnnnnnnnnnnnnnnnnnnnnnnnnnnnnnnnnnnnnnnnnnnnnnnnnnnnnnnnnnnnnnnnnnnnnnnnnnnnnnnnnnnnnnnnnnnnnnnnnnnnnnnnnnnnnnnnnnnnnnnnnnnnnnnnnnnnnnnnnnnnnnnnnnnnnnnnnnnnnnnnnnnnnnnnnnnnnnnnnnnnnnnnnnnnnnnnnnnnnnnnnnnnnnnnnnnnnnnnnnnnnnnnnnnnnnnnnnnnnnnnnnnnnnnnnnnnnnnnnnnnnnnnnnnnnnnnnnnnnnnnnnnnnnnnnnnnnnnnnnnnnnnnnnnnnnnnnnnnnnnnnnnnnnnnnnnnnnnnnnnnnnnnnnnnnnnnnnnnnnnnnnnnnnnnnnnnnnnnnnnnnnnnnnnnnnnnnnnnnnnnnnnnnnnnnnnnnnnnnnnnnnnnnnnnnnnnnnnnnnnnnnnnnnnnnnnnnnnnnnnnnnnnnnnnnnnnnnnnnnnnnnnnnnnnnnnnnnnnnnnnnnnnnnnnnnnnnnnnnnnnnnnnnnnnnnnnnnnnnnnnnnnnnnnnnnnnnnnnnnnnnnnnnnnnnnnnnnnnnnnnnnnnnnnnnnnnnnnnnnnnnnnnnnnnnnnnnnnnnnnnnnnnnnnnnnnnnnnnnnnnnnnnnnnnnnnnnnnnnnnnnnnnnnnnnnnnnnnnnnnnnnnnnnnnnnnnnnnnnnnnnnnnnnnnnnnnnnnnnnnnnnnnnnnnnnnnnnnnnnnnnnnnnnnnnnnnnnnnnnnnnnnnnnnnnnnnnnnnnnnnnnnnnnnnnnnnnnnnnnnnnnnnnnnnnnnnnnnnnnnnnnnnnnnnnnnnnnnnnnnnnnnnnnnnnnnnnnnnnnnnnnnnnnnnnnnnnnnnnnnnnnnnnnnnnnnnnnnnnnnnnnnnnnnnnnnnnnnnnnnnnnnnnnnnnnnnnnnnnnnnnnnngagattacttttataacctagaaattataagtaggtaactgtaattaaatgtataaacttagtagggtaggccctccctctatatattatttttaaaggtaaggtcttctttaaatcatggtttaaaggccttcctagtaactagcgctttaaagttagtctaaatagatagatattagataaaataggcctttattagttataaaagctctttattctaactacttcttcttatataaagggagtatattaacttttagtactcgatagctatagaagttatttaaccctaaaattcgataagatttataagaaaaataagattatattaatttatatactactatatttatcttaccttttataatcctttaatattagttattttataatagtaaaacggttatatagctaattagttaagataaaaatatagactaggattaattatattaataaacttaagttcttagaagtatacccctctatataaattaaagctttaaaattagagataattaaaaatagcttcttagtagctagtttaataccttttttacctaattaggtacttttaaagctaaatatctagctttaaatacctaccccctctctaagctagggtagtgacttaagctagaattttatactaaaaatccctactactaggaaagatctatgttaatnnnnnnnnnnnnnnnnnnnnnnnnnnnnnnnnnnnnnnnnnnnnnnnnnnnnnnnnnnnnnnnnnnnnnnnnnnnnnnnnnnnnnnnnnnnnnnnnnnnnnnnnnnnnnnnnnnnnnnnnnnnnnnnnnnnnnnnnnnnnnnnnnnnnnnnnnnnnnnnnnnnnnnnnnnnnnnnnnnnnnnnnnnnnnnnnnnnnnnnnnnnnnnnnnnnngagactggatttgcaataggattaactgtaacggtaaaggttataataagaagtgaatactacggtcggagattacttttataacccggaaatcgcgagtgggtgactgcaattaaatgtataaactcggcaggatgggccctccctctgtgtattatttttaaaggtaaggtcttccttaaatcatggtttaaaggccttcctagcgactagcgctttgaagttagtctaaatgggtagatatcagatgaaataggccttcgttggctgtaaaagctctttattctaactacttcttcttgtataaagggagtatatcgacttttggtactcgatggccatggaagccatttaaccctaaaattcgatgagatttgtgagaaaaataagattataccaatttgtatgccactgcatttatcttaccttttacaacccctcgatatcggttgttttgcggtggtaaaacggtcgtacggccggttggttgagataaaaatgcggactgggattaaccatattgataaacttgagttcttagaagcatatccctctgtacgaattgaagctttaaaattggagacaattaaaaatagcttcttagcagctggtttaatacctttttcacctaatcgggtactttcaaaactcaatattcatcttcgaataccaaccccccctcccagcaggggtagcgattcaagccggaattttaccccaaaaaccccttttaatggcaaagatctacgtcgataggcttcgtcaatcaaagctttacttcgtacccaatctcgaagcctaataagcccttctaagtgtgcattagatcaacttgtcaaaggctgctagattgcaatgcatagtgctattctactagcaaaagaaaacaaggatttacgggatgaaaatgagaataagaagcaaaagcgggctagatctagacggcagatacctgccgaagaaggcctctcagttcaagaagcttctgaaataattgctagactggtggaagcatcagaaacacccctatatcccccggacggaagcactcaatcagggttggaaccacgaccacgggctgcaccaaggtgtagtgggtgtggaaagatagggcataagatcaataggtgttcagataaatgatcctttttagtttaattaatttaatggcgttttggttgaaatatattccttagaaaactatactcttgggtagggtggcggctcgcttacagtggcggctcgcttaccgattacgttagctagttattatgtcaaggatgacttgacgttatcaactaattagtcatagttaattttgccaacgcaatggccagctaacatcgcaaacgatcgagacaacgcaatggccagctaacatcgcaaacgatcgagacaccaagagtttggttgttgaattaaaatcagtgatacgcagtgcatatccaggaaccttggaaggtaatggcgtccaccgtaagttgtaaaatatagaaaatccaatgtgatgttatcgtacaaggcagattatagcaaaagaaaagaaatgccgtcaaagacgacaggatatctagccaaaagtagagaaaatcaatcaaaatgggcatgctctcccaccgcagccgaaaacaacccgaaaatgctttatagcttcatgccaaacatgccgtgaacacgcaaactctggcgcatactcaaatcaagcataatctcctcgctaccaccggggatagcataggcacgcacatcacggtacagtctctcgatcttaccgccctgaccgccgcggctgtaacttaaaccaccaaagatctgactagcctcgcgagcgcagaactcaaagcattgcgttgactgcgccttcaatccagcaatggcaccgccgagcttgagcatagcctcggtctcctccatagactgacactggaagatgatgttctcaagccagttgtaggtggcctcgatctggcgagccatatgggcgagtttcatgcgaataaccgggtggtcgatgagacgcttgccgaaggttttgcgcttatgtgcgtatttcatggactcctcatagcagacgcgcgagaagcgcacgcactggatcacaatgccgatacgctcgtgattgaagtttgtcatgataaccttgaagccctggttctccttgccgatcaggttctccacgggaaccttgacatcctcgaatgtgacataggtcgtaccgctagaccacacaccctggcagtccatgcgtcgggtgctaacgccaccggcttcacgctctataagcagcacgctgaggccgttcatgccatccttgccggtgcgcacagcggtcgtgaaataatcagcgtagataccgttggtgatccacttcttctcgccgttgacaatgtagtgcttgccgtcctcggtgagcttggcctcgcaacccaagtttgcgacgtcactacccgcatcgggctcggtgatggcgaggcaaatgcgcttgtcgccggccaagatacccggcaggattcggtcgacgaggggcttcttgccgaacttgaccaatggcgggcagccaattccgtagccaccgatcaggttccacaccagaccaccgctgccgacacgcgacagctcgtcggtcagaagcatctcgtggaacaaatcccaccggtctgctgacacagacttcacgcggtatggggtgtgcttctgggggaaatggacacccagcagtccagccaggtagccccgctcgcccatctgcttgtagatgtgagcgggcacttccttggcctcgtcccattcggtcacatatggctcgatctcggactcgacccactggcggacctcgtctcgcagtgcggcatgggattcactgaagtagggggatgcatactatgagcgccatatagattagcttcggtgcaaccgtaaaaggcacagatcgatgatatagagcgaaagcaagacttacaccttggtaccacgaggggtcggcgaatgggatcaactctccataagggtcctggggagcgccgatggcaggtggtgtcacggaagactcagaaatggtaggtttcggctcgggggcagcctttttcggggttggcgctggtgccgggggtgccgagggtgccgagggtgccggtgccgtcttctttgtatccaacgaaccgatctgcagctgacccttgtacttcttcagaatgccctcgttgtggtatttccagaactgtttcgaagcgtcctttcccgcaactcgctggagaactagatatacactgtcaacgtgaattcatcggacgtagcggatgctctcggaccaacgtactcttctttccacctgttcagaacaagaagtgttaacatgtgattccctgcatttgcacacatgagttcacttaccagggtgctcatcttggaacttggaaacatcgtagacatcttcatcgataatgacccagggactgtcacccttgctatgcgaggcgacatcctctttgctaaatgtctttgccatggcgatggggggaggagatttgaggaatgaaagaaaaaaaaaaggcgtacaacaaatatttatactaagaccaagcaataaccatttgggagaaagaagagattttcaagtccggggaagctggggaatatatgagttctcagacgaggtatggggcaagaaacaaattccgccaagttcgggcgatattccaagtcaggacatgacgatgcaccaaaaggggcctcggaccgtgatagtaccagttcacatgcctccacacagagtcgaccttgggatcttacgttgtagcagtcgatgtttcattggttgccgatcatttcggtcatcgccgttgacagacagtttattggctcgtgctgcgtcataaatggaaatgccgaggcataacagttctctggtctgggtgcagtggatggctgagtcagccgagaccgggcatgtgagcatgtgaatgatgagcatgtaaacaggacggagtctgccaatattgatatctcgatagttatatgatgtaactgtcattatagtcacttgatacaattgattagttccggttcatagtttcgtcactatgtacccccggcatgtgcatgttctactacgaaaccatcaagcggtgccccggctgcggtcgagtgcatataatacgacaagaaagatggccaatttaaaagtaacataggaactttcatatcaatcacagtgacggaaagctatactagcccccaaatagatcacgtcggcgtagacagcctgattagtctagtaatacatccagcatcgagattctatgccgcaaaaacactctactgcccctcaccgtctgactcgtatgagaaatccctaggaacaggtgcatcctctacgccttcttcgtcctcatccaccgccgtcagaacaccggcagcagcggcagcaccgcctgacgtggctgcggatagagcagcccgagcaccagcccgttgaggcgtctggagagcagcggttccaattgcggcctgcagacggtcttggagggtttcggtcggaggaggcggttggcgagcctctttgctggccttcaattcaatgacctcgcgaggctcgtcaggttgcttgtcgagaacaacgacaacaccaccagtgggctggagttttgttagcattggattcattagcacaaataagaatgaacataccctcttgaccggttcataccgcgggtcagggaaagtgagatacttgagctgagctggtagtacccttgacaggttgtccagctcgtacccgaccttctcccgctctgccttcttcttctgcacatctgcagcaaccttctctgtctccttgccttcttctccctcctctttaggagcatcatctgtgtccattgtgtccagcagctgatcagtagccttgggtgttgtgggcgcttggtcaatgtccatgctctcacggcgtgcctgcttctcccgacgctgcgcgcgacgcttggcctgggcagtggtagaaagaacagcagtcttgaccttctctggggcctcctcggtcttcacttgttgctcaggggggtagtcgaagagactggggcgggtgttgctgtggaacttgaagtgtgggacttcgagcttctggtcgacaccgattacggatgttggcgtgaagctaagcgacaagaagtgtgtgagagggaaccagtaccagtactgcacgaagaccgcaacacccacgataccaggcatattaaggttacccgtctgcgtctgcaggctaatagtgcagtttcggccaccagcgtcaatgataccgagagcgatggcacaaccaaacttagccatagcatcctcgtggcggtcaccaagcatcttcatcatggccttgcgaaggctggtaacacgagggttcatggcctcgttctgctggacgagaaccatggcaagagagatcagagcaccttgacgaacaaagtcggtagagtccttgagcataggctccaggaggtcgatagcttcgtctaatccggtgccggcgcaggagataccgagcgccatggcggcaccgtatcggacgtgagggttgtatgactcggaaagcagctccaccatacgaggtacactctggtgcttgcggaacaagatgaatcccaagctgagcacagcaactcggcgcacatcgtcattaacatcactgacagcgacatgcagaagcttacgaactgccttgttgctgccagtgccacagtaagctagggcaatggtcatgataccaccgtagcgcagagttgggtcggggtccccgagaaggccgttgatgagctcgtcggcagcttcctggcgtccgaacatgatcaaagccatacccatagctagaccacgaacaatcttctcgtgctgtgtctcgtgtgcgtactggatcatgtcctcaagagccttcatgttaccggtaccaagcatgatgagacccatggcgagaccgacagcctcgccattgagagcggaatcggtgtaaagaacgctccgcaggtcatcgtaaatgccttcgtcgcctgtcgccatacccgcaacaccgagaccaagagcaccaccatgctgaaccacctcttccgtggccttcttgaaatggtcacgaatgatgtcaactgccatcccgccgtggttggcgtagatgagaccaaaggcgtaaagggaaccaccttggctgtagacagaccctgagcccccaactccagcaatgtgttcccggggcaggtaaggctgtaggagcttctgaccttggctgaggttgccgcggtgaatacagcccaatgcagcagtggctgtgaacttcgaccaatttacggccttgcccagccactccaggttatcacggaagaacttatcgtgagtagttcctgcatgcatgaacgcatttgaaagtgtcacagcggtgtggaagatagaattgcgagcctcaaggctgtcacgaatcttgttcagaatcgcgatgtcagccttgttgttccggtataagaattccagattcagctggatggtcttgattccatcaaggatcgaaagaatgttcttgaatgcagtcgccgctgcctctggtagttctacatgtttatccgagggccgggaagagctcccctggtcttcgagtaatgcgtcagactctgttggctcgctgtcctcttcattattcttttccgcctcgtcttcagggacaagttcagcaatctcttgccgaaccttctgaaggaactcctgagtgctgttgtcgtaaaggtcgaaagaaatttgataggcaacggcgagagatcgcgcatctcccttctcaacgagctggcgaagaatagcagaggccatggagtgttcattaagatagacaacacatttagcgattgagaagaagtcgggtgccgggatttcattaagaagttccaaaattagtttgaggatctagaaaatgaaaccttggttagccgactcagctaaaatggtagatatatttggtgaacgaacctcgctgcggaacgctcgttcttggacaatgcccatgcagatatccaggacatattccatgagctcctcgctaccatgggagtcaccatcttcctgcttttcgtcgctactggcgcgaaggatggccatgcggagcacatccaagttctttgcctcgatggcgattccaatgacttgacggtatcgcttctgtctgaagcatgcttcaaacaattgctcaatgacggtctgcagttgtccctggacaccacgcttcaacacgagagagttttcctcgtgctgaacgctagtgtcatcgccaccagggtgtgcggcgtccacaccgggaacctccgcgcgagaaagtaacgatttggaagggagtgcggatttggaaaaaggtgtaataggagaagtgaggctggcggatgtgctggtggcaccgtcgcctgatgctgggaatgcagtgtttagattggctggttggtcacccgcgataggccgttgagcggcagatagagagacaaaggtatcgacacatttagctacatggcaaaacatgttagtatcaaagagagacatgctgtggatcttcttcaacataccgataatggtctcctcatactctccgccgttttccaacttgaacagctttccagcacctagagcaagaaccatactctcgttatattcctgcagatgataatataccttcgatgcgactagtgctgcaaggccgcgttccggaaatgattcatcttcgtaaagagcctcactagatagatagtcagcaggggcctagtagccagtcagactcgggagaaatgacgcaaaaaccgagataatgcttattctcacgagtctagtcaaaacaaactcacatttcaggaactgcgttgacaacctctgtccagagatgatcgatttgagaatctaatgtcctcaaagcaaagaccttgagctctgggtcaggctcggagaggaagccaaccaaaccggcggccgatacgagtccgaccatctttattgagagaggattcgcgtcgcgagtttctggacggaatttgaggagtgataagtgtattgttgctgttgtgatgaagcaacgtcaatcgggagagagcttagaacagcaaatcagccccagcgcagagcaaggtgtcaagggagatttagtcaccccaaataatgagaatatgacaagaaagacggaatttgattaaatgaaagagacgaaatggatgaagtgcacatacgaatggaagctgggagcagttgtcagaagctttgctggcgcgagagcaacgtcaacgcctgagcggagctgactgtacatgacgggtcacgtggacggcgctcggtcagctgcgagctgcctgagtccgcggtaaacagcccatcacctatcgagtggactatttctttctgatccgatcttagattaaaaccgctaaatagtcttcctacgccggattgccgcgagaaagctctagccatccctccggtcgaagcttggccatcctccacggtccttcctctgtcatgtcgacgcttcttcaacaatctttcgatagtaagaggctgccgccagttccggctcgaatttcaatgttttaccatgaccctcttttacatgttgaacgtcaggcaaaacacatacaacgcaatctccaactcctgatcgatgctcaaagcgaaggccttctctccgggctgcaagcggacgatagctcgaccggaaattcgaccccaaaattgtcgtctagtgcggcccgatcacaatccccttccacggtgcctgctaggcagcccacgcctaagaaaatcgggcttcgggctgcccgggagggcatatttcaatcaatatatgatctactgaagttgcgggaagaagaacgagagattctgatatctcagaccaatgaaagagagaacgcgctacatgatatccaaagtttcctctcaagaaggaatggtctggaagacgctatcactactatacatggagacgaggagagccgacgttcaaagcagctagaacaagaagctcggaatctcgagactgacattcatgaattggagaccaggctgtatgagatgaaagctaaacatcggcatctcgcgaacgagatatcacatattaacaactcggtcgatgccaagctctcttcttatactcaatctttgtctttactcgactccgacatccgaaactacctccgtgaccctcctatccaaccgttatcgcaaagctcaggcgaatctacctttcactctttgaatcccaaacgtcgcacacttgacatggcccaggagaattggaacacagaacaagtcggtttgcacagtaggcaacagcaagtggatgcggaaatactggcactagaagaaggaggcggaatatggaaacaagtggtgtccgctgttacaagcttcgagaagcgcttgcaagccaacatgcggcattatgttgagatgaccacaccaacgaccgagtcagaagtgtccacaccaacaggttataaagacgggctggtgagaagtattctggatgacttaaagagtaccactcaccgggtcgaatcacatctggagctcgctgaggataaggattggaagctattagtttgctgcattgcagcggagctagaggccctgcgagaggcaaggggcttgcttcttcccgccttcggcctcccggtgcatgaagatgatgcacccctgaattccatatcccccaaagatcctctaatacaccacgagttggaggtcgaacatgaggacacccgtccggatcagctggaaaatgacgacccagaacctccagccgatctgctcaaggatgcagaccctaatcattccgatgccaggtcggaagatgatgagccagatccgtcatggctaacttgatcaggatctctagtactattaaatgaagcagagctcattgcatgatttacacagcatcttccagccaactgcatcttttcgtcttataaatttatttctagtgttgtcatctcatatcgataaattggattgttacattatatgcccgtatctcgcatacttgtacttgacgatgtgtaaattgtgtctagttggtcttccgaattattagggtgggcggatcagcgaaacctcgcccctcgacctcttcctgcatagcacagcacaccgtaagctttgcattctaaaaacaaagcaatatgaaataaactagacctggtcatggatcttccaacagcaagcttctcctttgtccttccatctgtttacgatggcaacaaactcgaatgccgcatttacctcccgcccgcgctcaaaaatatagaatcaccaacaacctggtccaaccgcggtgccattgtcgcgcacccatacgcaactctaggaggatgctacgatgatccagtcgtcgatttcattggcagtgagcttatacaagctggctgcatcctgggaaccttcaactttcggtataatcattcattgaacactccgccacgacaaagttgctaacgaataacaaatagtggagcgggtaactcccaaggacgaacaagctggactgcaaagcccgagcttggtgactatgtgtcgttctacgggttcatgttgcaatatctgcactttctcaagctcgtattggcatcgagggaacaagtcgacccttcaaagcctcaaaaagccatcgacggagtaggaaatagctcagatatttgtcttatccttggtggatattcatatgggtctttgattgcgtcacatgtaccgaccctcgataccatgctcggccttttccaattcacgccaacgacaacctctacaaatagagccacacccatacacgagattagaaacacagcaaaacggatagccgcattgtccctggagagacttcaaataagtcacagtctggccgacgatccagacctcggtgcattgacaacatctatctcctatcttctcgtgtctccgcttttgcccccgattagccaattcctgacagcattctcgactttatcgctgaatctcaaaacagagacccctaacggcccccacatcccctgcccgcgtccagcagatcagcagagcacgcataatactctggcgctgtttggggaccaggataccttcacatctactgggaaactgcagagatggtcagataaaatggtgaatatggaacgcagtaagttccagtttcggatgattgatggcgcgggccacttctggcgtgagaatggagtcgaggtgcgagcaagacatgcactgaaagagtggctctgtcagatatgataatcttgtactgttggttatttggctgttcaattatgctcaatatggtgcggcaatgataacaacctgacctcgagaccaagtgtcagactgggatatggccccaaacaggaaccttggcttttgttacatgactctctactatgatagttccaatgcccattcttccaggtattgggatcatcatatgcacatgagtgacttttcttttatatgcaaattgattggaagtcgctcttcctctaatttagcgtattgctgatatcggtacagtactgaagcgagctccgacacgcacgtagatgtatgaggttttgactatattaatccgccgtacgaccaagtagtaactatagttacccctacaggatagaatggttagaataagagagtggataactacatcatttctagaccatcaaagtcggcttataagtacccaaatcaagccccattatctcgatgcaaaaattctcaattcttcacataggatgtcaatgtttacatctactcaaccttctttgatgctgctcggactcctccattcacatcaacatgcacccctcgcaaaacatacccatctcgctgcgcctcatcccactgttgccgtattaggtctgaccgagctgtggaacgctctaaaatccgtaccgagtactccttcggcactcggatcgcgccctccataaaaccttcgtcgctgatatccaagggaacctcgtttcccttatcatctaacggcaaacggaattcataggcccagatgagattggacaccgccaagaagagcccattctcagccaagtgaatccccgggcaaatacgacggccagcgccaaaggtaaaatggtcgcgggcgaagatatcaccacctgcggcatacaccgcagaacgttgcgggtgattaaggtagcgctcaggtctgaagccaaagggatctgggaagcgttcatggtcccagtgcagagcattcagattagcgaggagaatggtacccttaggaatctgatggtcgcggtagtgtacgtccccatccgccatgcgccgaagccccgtagtagcgaccggacatagccgcagagtctctttgataacagccttgatgtagggcatttccggctcatcggccagggtcgccatccgcccatcacccaggacccgcgtcacctcctcaaatgcccgtgcctgtgcctctgggaacattgccaggtaccggatcatgccattcaacgcgctggcggtcgtctcagctcccgcttcggggacagcactggctaaccatgagatactctcctcctccagaccatattcgcggtagtttgactccatgaggtccttggcaaaacactctggggcattatctgcggcgatacgttccttcagattgttccagtgcctcattttgttgccgtgcatcttttcagccatgaacttggcctttggccacgaggggaacaagaaccgcggcagccagttcagaggtgggaatacatcaatccagaagactccaggactcagaatgatagacagcattcgcatgttgccgtagacgtcgcggacttcctggcagtcccacttggggattcggagcccgtatgccgatgtcatgactatggaaaaggtcatgcggcggatatgtctgtagaagtcggtgctattgcgcccctcattgttcgcttcatggctgagatcccagaggagttgcttgatttcaaactcctggcttgggatgaatgctgcggatgccttggcgttgaggagctgtttcagaaacgcgtgaagccgcttccattttgtactgtaagtcatgggcagcacaccctcacccctcaggcagaactcttgtgcgatgggcaggggcggtttgccggatgtgacggcggcctatgtgccaattagcatctagttctgcttcttgtgctgttgggaaggatgcaagtgtttggggatggaattacctgtctatcaaagacttccttgactgcatctgggctgttaaagaacacccagttataccaacctacgcgaaccttgaatgtatccccatactgcgccgcccagcggctcaacagctgccgaggccgggcgggcaggtccagcccaatgccaaccaatggccagcccgagggaccgggtatattggcaagaggcttggtagtcttgcgagagtaccggactgtccaaagtagtagttggaagagtaagaatgcgcaggcaaagccaaacagtacagttggcctggaaattgcggagacaaagcgaggggaaagaagcagttccacagcatcagtcttgtaaaaatccattgcgatggtttttataactccttacagtgggttgattgaagaagtaggagaaaattggatcaaagtccaagattcctaggagttcctagagtatccttttatgtccttaataacgtgagcactgtagcacttacttcaccaaaccccacaaattcatgagttttctcgtgaatttcaactttacttgtccaagcacgaaagcatcatcaaccaaatggaggatcatgtccgttgggaatacggccctcctccgccctttgacaaatccccgatcattactgacgacgtattttccgctccatattcctgcatgtgcatagtgcttgctttagctttcagagagccagtacaattagcccgaagaaagcaggacatcaaccaaatcgaggcttatgtccgttaggaatcccgcttacttctcacccttcctatatccacgagaattgatgacgacttactttctactccatatccatacatatgcatatcggcctctccgtcgttgaggtggttgacccactccaacagggaagaaatgctatccatctaatcaagaaatgtccgttagaattacggctccatctgcccgcccatatattcacggaccttactccgtaccaacgaattatattctgctccaaatctctatgtatgcatatctagcctttccgaagctgacgtggctagtcaaaggtaggtgaaaaatccgtatgatcacttagagacacttgggatatactaatgcataaagtagcttccacctcgaatattaacggctcagaaaagcataacgggtatcatgaagaagtagatgtacatttagtgggtagtatacctcatatacctcatatttatgagtaaacaatgaattataattgtgtaatatctagattctgtgttctagattcaagcggaaggcatgcatcccaattagggttaggtgaagccgatgacgtcactcttttgatatacggtaagggtccagtccagggtcatgtacggtatggtacgggtatggaatcgttctgaaatttataccgcgtgtattgttaggttataaaccaaatgtatgcaagcgttgtacttcgcataagcacgaatgcaactccactgatagacacgcggccgttccctagtcgtcccgttaaactggggatggaacctatattttaaaatctgttaacgaagaaccccgagcactcaaacgggtttatcgtgacgccaaatcgccataattggtacgaggagaaacgcagctcccactatcattgccattccactgaagatctgcaatccaaggaagccgttatctcccccatggccctcaataagacctgcgatcggcgctccaatcagcacccccagactagtggcaaaccactgcatacccatgcgcgtcccaataaccgagggtgttggtgagacgatgggatgagcgatgaccaatgggttggcggagattaataccccggagaagatgccaaaaaggacacagaatacgatgaaagcggggatagagtggatacctgtccagccgaagaggatcacggctgaggcgaggacgctagtgagcagaacagtgctggcgcccagatgaggggtgagcaaggaggagccgatacgaccgaaggcggagcccgcgttgagaattgaaaccatgtagaaactcagctcggtggaggtgtgcagggcaaccgaggcaaaggtgggcaagtagaagagcgggatgaagtaggccataaacatgaaaaaattggcgaccgcgtaggcattgaagctccattcccgaaaggcatgccagtggatgagccgtcgaggggcaccatggcgagctttggtggtggccattagaagggggatggcgatgcacgagcaggccagctggatgaagcccatagcacgcactgtccacggaaatccaattgacggctgaagtcggataaagatgacggggaagataaccccacctagattgtgtcgatgtcagatttggtcctggtaatcggaacgaagaaaaacgaagagtagaagggtcaaatgaccgtaccaacactggcgccggaggtgactagtccaacagcaataccgcgtcgcgtagtaaagagggtggaaaccagagaaaggctaggcacgtagatcagaccactgcctaaacccacacacactccttgcgaaagcatcacttggtaatattcggtggacaaactcagcatcatgagccctagtgtagtcaagaagcaaccggcgatcatcagatgatgcaagtatccacgatcgaacaggggaccggcaatagccccagtggaaatgagtagaaaggcactgacggtgccgacccaggcgattcgggacggagagctgtcgcgcaacaggtcggattggtagtagctttgaaaggcaccaaacgcagtcgagaatccccatgtggtgacgaacagaagaaatgaagcaaatacgcccgaccaggcggccaggccaccatttggcggcgcagcgggaagactagactcctgcgtaggtccattggcccccatagcgattgatagccaatttcgtgttttttgagatgcggagataaagataaagagaaaagaaacagtgaattatccaacatatttaaatacccagcccgccccttttcctcgcaggtcggagaatcccccaggcgccagattcggaaaagcaacaaagaaaaaagtcccccgaatttgtcatcatgcagtatgtggacatccttgtcacctgcaagtcacataccgagggccgagcattaatatcttttgcaggtctgtaatgccatctacgcgtttgtgtgcaaacacttggctctccaatcccgagaaggctattcctggccaattgattattatctgtacctggcttggggcttcacccaagcatgtcggaaaatacaccgacctctatcggtctattgcaccacacgcccggattttgttgatcgagtctgatgtctcgatattggtgagcagctacgcacgccaacgtcgccggatccgacctgtggtagacatcgtcctggagactttagcagagacagaaaccagctctgacgacaacgcaccgcgaatcctactgcataccttctcaaatggaggtaccaacaccgcaacccaacttctgatcatactccgtgaggtcgcctccaagccgctaccattgatagggctggttctggacagtacgcctgccaaggggacatactggaagtcgtacaatgcaatggtcttctcccttcctcccgcgtctcgattcgtgggctcaatggtagtccactgtctattggtactactgtacacctggatagcatgtggaaacgaaaacccagcgagtctgatgcgtcgtaccctcctggacaaggatactgtcggccctgcgcctcagagacccgaccccgaagctaggggatacatatattacatgtactcgaaagaggatcgtctgactgactggatggatgtctgggaacatgcagggaaggctagggaggaggggtggaaggtcaaagaggtcgtctttaaaggcaccggccattgtgcacacatgccctttgatccgatgcggtatacggagtgtgtagagcaggcatggggtgcaatcagcaagcctgagtccaagctgtagttgacttgctgacctatttttgatcgtgtcttccttatatctatgaagcagaggtgggaatttgtggaaatatcaagatggttcaaattgcagccacagctcatttattgaagactcccaattttcactaagagaccacaatcttactccattctacacacacaagtagtaaggaatcttcctcggatcaatcgaacgccagataaaaggcataccctgcgataaaccatcctcgtcgaattgccttgtccggatttcttcactgatagctaacatcgtcgcccgaaacttcccctcggcagcatgaagatcgcttccagccgggcctaagaattcggtctcccagaacatatgcggaaggtttcctttctgctcatccaacaatggtcggttgaacctgacgaggagcgaagcttgcttcagtgcctcggtctcgttatgcagccacgggatcagcgattcgatgccccctttagtctcaggaagtggctggttgaaggaggagggatgcaacggaagcacacccaaggcctccccgacagtcgcaccattgagtgcatgatgcgcaatcccagagaggaatgccatgtgggagagaatcgagacaagatcctcgcgcgcgaataatggggcagggaaaaagtcaatgacttgagcctcactggtggcctccatgatccaggcttgtagttcgtggtcgctgcccatcagactgctcttggggtaggaatattccacgaaagaacgagtgaagtcttcgatggcttgcaccatgggtgccacagtctcatagaatgggaaggagcggagcggaggcccatacgcgcaatctagaagaccacggtctgcgaaatcccgataaaaattcgtggaccggaagtgacccgcgtgctcccaataggcgtctgttgcgaacttcttgccggcccagtttggaaccgcgaaggagctgtcgtagaaaccgccttcattgaaaaggaattcctcaccaatgggtcgaaccgcatatgcctgatacattactttgaataattagctgcgttgaattttgaaacgccgaagggagagcaacatacagcggtcaaggtatccacggacaggatgccgcgagctcatggttcgcaaggcagcctggtgcacgggctcagcgacatcatgtgtatttgctagatggtatagctgggaatggaagagatcgttcatgccaaaggccattttggcgaaaagccagtcatttgcgtcgtcccgtggcgtatatgtaaggtttttccccatgttagtcttgatagccaatggaaggaaatcgccagatccaggatggatatagaaatacgcggtacaagcggctgtccagcgcccaggagtcttggggtaaggggcttgataggaatggtcagcatagaagagacgtccttcctggtgtagatccgccagtgttcgaccctcagccaggtgttgcaccaccccatcttctactggaaaagggagactgtcaattctgggatgtaggcgtcgaaccacgtagggattagtagaaagcctctccatggagaaaagcagatcttgggtccagttggtcagcatcccgggggatacaccgtccgggagtgaggaggcccattgatctttgtaaagaatctcatagctggagagtgattgtatgccccccaccttatatgattagctagggcccattttagacaaagggacttctgccggcataccttaatcagtgctgcagcggccttgtccaactcaaggtagacgttgttggtgacatattccacatctttgaaccacgcaaccctgtctcgggctaccattgcttctcccagaaccccggtagggaagaaggatgtgtttccgagtaaagggggcccatagatatatcctgctcgagctagacgaatctcgtctactctttcccaggacctagtgtcaaacattggaaggctgtacttaggaccattgtcgtcgggaagtgcagcgaaaggtttcagaaccgactgaacggaaataattggccaagcaacagcattgccaatatagaggaatgatagtaaaagcttataaatagggaagagtgtcattttatatagagaatcaatgtcgttgtcggaaaagaaagcaggaacttgacatttttgatgggaatcaccgacatctatattcattccttgacttgaacgtaagtccccccctcacaatcagccccagtgaaactcatgccttctattttctgacattctacatatctccgctctcgtgaacggccgtgtttactccgatctatgacgaattaccagtgtgggcccagctggacgactcaacatctagcagtcctccaccgtccaaattaaatgcatgatgctgtaagtaagctttctgattattacgaggtcaaatatatttgcccaattgagccgtctgtctgaacaagataaagaaaaatgaatttttattcccgtacattatctaccctgccagccatgcacacaatgcacaaggtaaggcaaggttcctaatagagtcccttccccgatacactagaatgttgtcatttaaatcaagggtaattacaagaatgggtgcatgtctccttgaacaaacgtagattgctctctcattgattctcccatctaatcaccaaaacaatgaatcttgtcgccattatctgtttgtggcttaccgttgtctactgctatcccggcggatttgactgggaccaagctgctagatatcaccagcagcaagtccttcgtgatgacaatgaccgaggatttggcttgaacgagccgtttgtcccaattcccgctcatattctccctgagaagcagccctttatcattgacggatctattcatttctacgaaaagcatctcaatggctccggcccagacgggagctaccgtcgctcatcttgtccggccgtgaattcgttggcaaaccgcggatatatcaatcggtccggaagaaatatcacttatgctgagctagcgcacgcagttcgccgagtgtggaacttcggggatgacaatgtgaaaacctctttccctcaaaatcaaagtataattcgcattcgtactcctgctgacttgtgggggtagagtatgttagtgctggcgccaacttttgcaatgcatggatggcctgaaacgattgatttggattacttcaatgcatgatacccatagctccccctggttccctcgtgctagacactaataagtattcctaggatgaccatgttcaatacgtgattaattgcccggccgcaccaacccgcaatgaccgcgcagtgggtgacaacattaacatcaacatgactctcttcgagtccctgttgtccttctccaaggatggcgaaaccttgtccctagaggatatggcggagcaccatcacctacgccacaaccaaagtaaaatcgagaacccggacttcatctttggcaatcaaggagcaatttgctcactgtaagtattaggtagtggccaatactccctaactaccctaggcctaatattcaagacatacgttctgacaaaggcagtgcccaatacacaaatatggtcggggttctcggcaagtttggtaaacatggccgaactaccctattcattgacgatgtcaagactttctatcttgacgaggacattcctcggaactatgagcgcagagaagcacccgtgagttatactatgcttgtgcccttgtaaatagtatccttactaaaagacatgacagcattattctcccgagtcaaatgcaatgattgaccgcatggcgcatcatgttggctacactattcaacgaccgttcccggagggggatcagaatcccggtgtggacatttgtccgatgaaggcgcgattccagcacgaggattgtagctagaattgacaataatctctcatgatggtctggaagggatgaaaaactatagcaagcagatcagattgtggagtatattgatgtggcgaatgaatgagcggattattgtgctgtatacacacacctatgaggaaactttggcccagtctagagtaattgtccgagcacagcctggcttacacctataatattattagataggaggataacttgacactaggtacccatgcatgaagcttctaggaatatagtttctatgcgcgacagatggggcgatcgtagtcccggagggttaaacggtcctttctacataaggaccatgcaaaacaacgagaatgttccgaataagattatggtaactaggtatgcatgtcatcttttagtaaggtagcatacgaaaacatagcgcatctaggccctaaacatccagtggtaaaatgtcttatcttcttcccacataatacatcgaaaagcagggatcactacttagcgtacgagtacggtatgacaatcttacattcactgcagagtagcatcaaatgggcgcaattgcggatgcccgaagtgggccctgcatgagtggacgacatgcagggtaattatcttgattagaggacacctatagggaagtgtagttttgatccggcatgcaaggcgtcctctcattgttaatgataagtatgcaatttcacataaaaaatctcaatttcttgtctaagttgcgggctagaggctggatacagaaattatcgtgctcaagagtcaaatttcgatgatgttctgatatgagccagtcatctcgtctatagctttcctttggtaacttcagcgagagttctttgcgtatgcttgtaacaccaggcaggatccgccatatccgcccggatcccgtagttctcctccgcatcctccaacactgccatatccagggtggccacccccattccttcggtggaggtacccaaacggaccaatgggccggcatatggaatcgtgatttgggaaagaccgcagtagttcttgcccggtggtccgcctgcgttggcaaagaccacggcacaggtgttttcgaatgtgcgtgctgtcaaaatgctgtccagaaacagggacggcgcggacgggttttgccgacggcccgcctcggatgcaccgctgcgggtccacagagtgggaacaataataatcttcgcaccgttggacgtgagctcccgccatgcctcggggaaggccaagtcccagcaaactagcagaccgaccggacctaggggggtttggatgacctggtgggggctgtcgccggaagagcgaaggtaagctcgctcagttgggccccacagattttttttaatgtatgagcctagtatctccccagtattggagatgaagaaggtagcattttccaaaatgggtgtcgtgggtctctggtcggacttgtttatctctgtgacgtgtgctgaagatgcagatacgggtcggacgatggacccagggacgatgcagatattacattctttcgctaaggcctgatatcgatgcaaatagatctcccaatcctcacacaacgaggcaaagcgggggtctgtggggatccagttcgtcaagtgaaattcaggcaggacagcgagttgacatccctgagctgcagcctcacgaatgaagtttacagcgcgagcgaagttatcctcgggcctgaggggctagaaggtcatgtgtcagacactgaaataataatatggttgtcttgcattttccatttctgaagaattgtggatgtaatcttgccttaacatacagctgtattacagcaatcttgcaaaatggcggcatgatggttacaaaaagaatcaaaatgatcaagaactaaaagaaataacgaaatccaaggggcgagatagggttgcaaggatacccgtcttctttccaaaggttgcgaatttggatttgtcagaagtgggcccccggatattccgttacgggtactccgggcgggtactccgcatagccccgcgtttcaaatggtacttttgtattcggtttctgttaccgtccggtatgtaatgtatcatacctctttagtaaataccagtaagcaatctcacagatccagttctcaaataccgggaagggccgccgccatgccgatatagatctcaattccatattggccatgcatgcactttcaattccccgtttaggttgcatcaccgacgtacatatgttgaatccgtttgtttgactttttttcttatcttcatttctccccttgctttttactaaaagccttggtcatgatgcatgagtaactctatacaggtttctaggtggatttcgggagttgctttggatataatgacggaatatagtggattgaaggcattcttgctcaccttggaataactcttgcgccgacgaaactgataagatttctcatatagcttacttatacgcagtgattgaccttgctctgtgggtgtcaccgtgcacatccttcctcgagttcaaagttcaaaagtcccagctcattatcatcatgtcttctctccgtctagcaatgaccagtctgttaaccgggttgcgcccagaggtggtggaaaaacttcagtcggacaagactggctttcctcaaaagcaacatgtcttccatgcatccgacgttcctaaatggatgcaatgggacccgtttatccaacgaggataccgaacccagctgaatagtttcaagcggtgtttctggtccctattctatctacataatgaatcaatcaacacctggtcacacgtccttgcaggaatttatttcctcgccgttcttctcgccaccgactattggatcgcccaactgggactcaaagtgccattatcagacatacttgctattcagacgtatgttgccggcactgcagggtgtctcatattctccgtcagtctctccgttaatcaatcctttttacaaaatccagaagtacttaactgatcctcacaattctaggctaccttccacgcaaccaacgctcattcgcctgaagtcgctcatgccttcctcaaactagattacttcggaattgtgctcaccatctcaactacatgtatctcagtcgcttatttcgccctgcacggagaaccgaggctccaatgcgtctacattttcttcactgttctctgcgcagctatggtcttctgtatcacacttgatgtcggtatggatggtacacgtgctggtccatggaggtaagctctagcataatatcttctcatgtgttattgcagcatttcagttcaataacacctgttctttcctcacacagagcaactgtattcacccttcttgcggctagcggcctagcccctatcttccacgtcatctcgagcggttcccctcgcgatttcatccgcatcccttgggagactctcatagtaacctgttcttcatacgcaattggcacagtggcgtatctcttccggtttccagagcggtattggccggcgcaatttgatattatcgtgagtctgattcatgttcataacggaaagaggatggtttgggattaatgagaaatatagggtgctagccatcagatattccatattttggttgcgtttggccaggttgtgcatctgttcggacttcgggatgtgcttgtaggaatccacctagagtcgcatacggtgtaggcactcagtagtaccgtaccatacgtctcaatgaagagaaagtgtgttttagaatgaggtggcagtgaagagctttggtagaatgtaataattcaggaaaacgaacgagttctataaggccaacccggatcagaaaaggatgctgttcatgtcacggatagttagccagatggaaatcaaatgattcgggcatggcaatttcaactatcagtcgggcctgtcaaacttcatgcattccagctaactaaatcaatccatcgcacaaatgtcatcaatagtgtccacgctttgggcaagattcacgaggtcaggtgctcatctttcagcttacgtaattatcaggtgatctgggtgtttacctgattatgtaagactcagggcgtgctcaattttactcagaggagcaaaagcggcaaggaataagcactaaaacgcaaagggaaaggtgatgaccatgcagcaatgcttccccactgtccgagatgaggttgatcgtggggtgagatcatgtcttctgatactatcggttatagaagaaatattgtatatcgcacatcttttcctagagtagtagaataatgtatggcatgtgatagtgaaatcgtcataaaaggaaccaagtggctcaaagggcccgaagaaaatggctaccattggccctcgtgacgtttgttaggtcaccgccaaacttgacttgaatccggggaatctctacttttataactcgtttactggtttcgtttttattataatactttcattccggagctaacagatctccgcatttcacaccccggctgaatggcttgcttctctaatgcacaggcctaccatgtcggtgttgggcgaccccacattagttcagtgccatcatgggcgcaaacactcccaagaatactctttaccccaacccttacctccgcgaccgctctgcaaaacgatctccatcccaaccgtatcgtcgctcgtgaaggattcgtggaattgggccggtgatactctgcacacctaccgtgatggtctctcgaaggaacaacggaaacaaagggcggacatcgaggaccgcaagcaagtcctgtatctgaaaataaagaatgtatgtacatgcggtgtacctgggccgagcgatcgcatctgcagggtgacccctttctaacacttgggctgcaggctgtgtcgtacgaagaatggcgaagttgcgccagtgaactggacgaactagaggataacaacgcttggaagcagacactcgagtgcaccgaatatgatcctcgtttggtacaggatcgtttgcgacagttggaagaggctcgcatcagctgtgatgtaagccggatgttgttcttggtgcgtactgcgctgagtcgggacctggcgcatatgagcaatgcctctctctatcgccatttgcatattggtacaaaggacttgatcgataggtatatcaccacggctttggatactatcgctacgctggtggatctctcggtgcatgatcgctgtgatgggttggagctgaagtatatcctggaccagctcctggcagctcgacaggcatttggtcgcagtgctctccttttctccggtggtgccacttttggcatgacccatatcggggttctcaaggcgctctatgaagcaaaaatgattccgcgaattatctcaggtgcctcggctggtagcattgtgtgcgcggtattttgcacgcgcacagacgaagagcttccggcgcttttggatacctatgtacatggggatttcgacgttttcaatgaaaagggccaagaggaaaatatcttgcagaagatgactcgttttttgaagtttggatcattttttgacatatctcacttggcgaagactatcagaaactggctgggggatatgacttttcaggaagcatataaccgcacccgcagaatcctaaatatctgtgtgtcaagtgccggcatgtatgagcttccacggctgttgaactatatttctgctcccaatgtgttgatctggtctgctgtgtaagttcctcctttttcacatcatcaacccatttctaacgtctttcaagcgcggtatcatgctctgttccttttgtctttaggccattcacgttgatggctaaagatccgttgacaggggaaccggtcccctggaatgatcttcacaagcagtatattgatggctcggtcgatggagatttacccatgacacgcttatcggagatgtttaacgtgaatcactttatagtctcccaagtgaaccctcatgtggttccattccttccaaaggaaacaggcccacaggatgcgacaaacgacggcccttcgttcattcctcgatggatgaacatgatggcgcaccttgccaaagacgaggttctgcatcggatgaacgtcctctcagaacttggagtctttccaacatcaatgaccaagtttgcctctattgtgaaccagaaatatcatggagacatcaacatatacccagaactcctttcctctaacctcccgaggctcctggagaatcccacaacggagttcatgctttcgtcatgcctgagtggcgagcgggcgacatggccgagactaagccgtatccgaaaccactgcgccattgagctggcactcgataatgcaattcaaaatatgcgggcccgggtggccttcagtccaagtcaggttgatctacgtatgccgcaccgtagtcgtcactcgattgactcggcagacagcaacggaaggggacgttatcgcgacaggcgaagagggtcccacagccccgaatttgaaaagaggcagtcgggtgggcaggaactacgtcggccagatcacgaactgagaaaggaacgaagcactgtttcgttagagaacccgcctctctcgcaatcaagcgagtcaatcttcatgccaacccaaacaaggacccaccgccgtacatcctcagtattcttcagcaatggagggatattcgatattgggtcaagcagcgatgacgagctcgaacgatcatacatgcttcgtcccaaactcgcaggccaccgaacgttctcagagtcatcttcgtttggcagagtagctccgagtcacgggccccgcagccctgtccggtcccgacgatcatcattatcctctaacccggcctataatttctcctccacggctcgtcgcagttccccaaagcaggtttatacgccgtcggctcgcgatttctccgtgaccataccaccttcatcccgccatctgctcagtatgactccaacgccaacactccttccgagctcgcctgagcccctcacgcgcaagcggcagaattgaataatatacaagcaattgtgcagcttacttgatcctttcctttttcgggagtcacaggccgcatactccggattcttgacacgtacgaagtacaagctcgcccctcaaattccccgaatttcgtgtacgatctaggacactcggacaagaaggctttttgattcttgccgattgttataattccgtacacctaccgctaagcatccactacatctcttttcggtcatattccctctctttgtctatcgttgtctccgggttggtggcatctatagaaaggggtgttagtctatgcaacccgatattatcgtactagaccacctcttgcttatcccctttgcatatcgaatctgccggatttgtctgtttcctttctgtttgctatctacaacatatgacatgcatgcagcggttttttgtttttagcggggacaattttcacgtatacacactatggggcgttgaatcctcagatgaaacagtcgaaacctttaaggggctattcgtagctaattttaagttaataaagatatattattctccattcaagggttgatcgtgatacccttctccaccgtcggcgctaatggccctgaagctaagctatttcccagcacaaagtcccgggaacatgccgctgagtgagcttaatgctgtagccacaaaggaatgcttggcgttcttgaaaagccaattagaaagaagctagtggaggtcggaagcaaatcaatatcaggaaacaatcggcaaattcgcaatttgggtgatgggtcatgtagacacgcgtttcacatgttcatgcaatccatggatgtgcaatatacgtcgatatgccgatagattgaaacgaaacacaaaacaggtccatatttttccgtaatcctcatgttgcaagatgttgcaagtgttcaagggaaaagtggaagtgtccactaccaacgtccagtctatatcaatcacggggttccactgtggaccctttccccagggctgacgacgactcggccatcaactaatgttccaggccacctcgaggatcacgacctatggttctctactccgtatggttctcgatcttttgcagaaagaggcgatgctttctatattccggtggagtatatcctagctcaaccttagggagacttcttgagttgttctgagcgcctctcctgcggatccaaaatcagcctaaatgttctcaactcagaaatattggaacaaaggtgttccaccctgccgatcagtcgttaaccattggtccctatttatcaatcggtgactctgttcatgttttctagccaccttgagtccacccttgtccgtggacaaccagcgcatcctgctaagcaaagtctggcgaagtctatgcacatgaaacgagtgaccagccattctgttacggataaagtctaatgacgtcggaaaatagagggatgaggacatcatctctgacatgatgtgatacgacctcaaaaaaaggggtatcttgcaccaggcgtcctgaagtcgagttagagccctcggccgtaccacgttgcgaacctgttatgtacaacggatgtgagggaagcgattgatacggtcagaccatcctgacaatcatcgatttgcttttacgttattctgcacgcggaacatgatcgtcgcactaatgtttggtacctggctgtggcgtctgtagcccaactgtaccgtcgatactttccttgtcgaatgcctatgacaactttttaccttctcttacgcgttggctgaccagcaaacgatccagcgaaaatacctcaggcccaggccatgtgtagagctctgcccatccacgggtgctgtctacctggtccctgacaaccctagcgtcccccaagttaagatcgacaagcccacttctactccgtaccgctttaaggtatcatcgtccggccagtccaccttccggcctgtccagcctctgagaaagcaacaacactgaagtcatggcgcgatcacggaatccatttcggccttgcaacaagcttggtaaatcggcagacttataaacccgtcccagaccctccatagtttttttctccgaactataaaatctgtccttgatacaccacccatatatctgatttctgattcaagtttctccattctttactttgatatatcttccaattaatctataccaatcacaatgaagtacatcagcatcgctgctatgggcatgatgggctgcgccctcgcccttccccagggtccttctcctttcggcaccctgccccagggtgccccgcctttcgctggcgcccccagtgatgcgcccatccccagcgaaactgccaccggcactcctaccggcattccctctggcctgccctttgacaagcgccagttccattctggacccggtcatcaaggtcctcctcccgacggacctgctcctagcggctccccaactccgactggtcctcctccctcgggcttctcgagtggtttccccactgacttccctgcacccaccggtcttcccttcgacaagcgccagttacactcgggacccggccaacaagggcctccccacaacggacctgctcccagcagcttcctgacttccactggcactcttccctcgggcttcccaagcggcattcccagtggcttccccactgactttcccgctcccaccggctcccctcagtaaacactgagtagctgagcgaccaagtggcttctcgccatctattgctacactgaacctagtcttggacctctgatatgaattgatgtttgatgtcacacgcaagacagctttcgcgcctcgtgtttgttgtacagtggatgtgagggtctgatgtattgggagtagttgactcaattgcccagtactgtatacattatagggaatattggttatatcatgggaaagattggttgggatgcttttttctttcgttggattcgggtctgcgagacgatttattgtttatgaattgtacacaggctttttcgtcactttttggatttgaagatattgtcacttctctatcaatacacactcgtttgcgctacctaggtatcatgatgtatcagtgtcaaatcaaaactatagtggttagtcttttgatgtgacaaagtagttattaagtggccagatgattcaatcacagagctcattccctatcaaaaaacacgcttgtgcagatattccagccgccaaagttgacttatagtcatatattttactccatagagttggtaaaagataacagaatctgttacgcacagtcgtatagctcctcaacccggtatcagagacagtttaggcaaggtatctatagatacttcaagctcgctagcctatatatcccacctttctctactgaagcttgaaatgctttatactaggcctgtacttctgtgagacgagaggcaagtagaaatatagtagatatgtatcattgccatgtggttgagggaattgtctcattttgaatgttttgtttgacgtaggttggggctgctgttcgtttccggtcttgaagattgtttgtttacgtatttccttttttctcaatctctctgccttctatctgtcagtcttatgtatcttttggcttttccttgggcccaaggaaaagcagagaagagatttgtatccatctgtaaagcacacgtggggatggcgagagcctcaagtgactaggcacatatccatttaggaaactgtgaccccttgtagatgtctcaataaccttaagcaaagagtatctgcggccatctccattctctttgctttctagcggccgattctatgctgcattcacgatttcacattcgaggacaggaaggttatggtgtagggcaagcggaaatgtacctacaaagtgaaagtaatgatagccagtccactctgtctacaggaaagggacctgtgacctgcgatatctcaacaggatcattgggaatgtcagctcggccctagtcaagtctcaacagaggtaggtgtctcgagcagcctgggttgctataggttccaaaccgagtgctcttgcttgtgtattctagataaagatactaaaacaacaccattgcttcacagggatctaacatgtactgtatcgggtagtctatcgtattggaaccagaattcatgactgagtaccggttgtattgattccccgtttgtttgaaacccaaagatataaaagccctccaattgcttgttactgtctgtttttcttcttctcttcaaaacataaccttccggacttatcatccacactcaggactttgatccaactatccatcacttccatcacatctatctatcaacaaacaaacttgatcatggctccagtaaccgataccacgagcgaagccaatgagcctgcttcacccaaggccaagctcagaatcaagctcaatgtcaagcccccggccaaggctgagaccgaggtagaggcccccaaggccagtgacgaggagttcctcttaacccttctcgataccgtgaaggtcagttatctctcactcaatacctagctgctggactatatggtatactaatcaaagctcaccacaggtcaagcaccaggccgcagccaatatccttggcatcaacaaggcagcatgtcgcatgcgatttattcgcttgcaacagaaatacggcttcaagaagaagggccccaaaggtactccacgacgcaagaagggagctgccatggtcactcctgccaatgaggccgatgtcgccgaagggggagactaatggggaggaagccgaggactgagacgaggactgagatacccggtcgcattggccacaactgtggtgttcagaagaagcctggacgggcagatgaatgaaatgatttcctactctcacctcactgtcctatcaatctgacaatctatggtcagatctacgtaatctagtagcgccgtagtcgagtgatatcgtgatccaagagatggtgacacacatggaaaccctacagtagacccagatccctccaatgtcgcgagacacagtggaatgaagcaatatacacatgtattctgagctcatctaatcccattgtctagcattacgatcgtagatgcccgaaaggtcaggcttccggcagctagctaaatctagcctgctcattttgcttttaaaagtaactcttgtcttcatttctattattcacccttcacttatcaacttacttatctgaaagcttcacacttactctaactcctgatcctatgattctacacctcactatcctgccatgagaaccgtacccagcattacatgattcaagcccgagatctgtatgcgtatagaaattttgaggttggcgatgaacacggtgttcaaggccgattccaaaatttctttggggacgtacttaatacaatcttcgagttacaatcgaccatcacagcaaacatcaacctccgtttcgcagattttaaatgtatccagtctacataccccggcacacctgacttgatactgaaggacaacaatcacaccttaaaggtcgtgggggagctcaaggtactgtggattggcgagcatcagatgaagatgacacgaaggattgccaatgcgaggcttttgagagagatattggcccagcctatcatgtatatgaagcatctgggctgtatgtatgtctttctaagcacatatgaagagacgatgttcttgcgacaagtcgtggacaataatggcgtatggaggattgagtattctcctgtgatcttgtcgtccaccacttacgagaaacgcatgatcacttcccctgtttctgcgacgcaatgttctttctattcaggtttgaatgcgttgaatcactatataaaatacacatttctctatattacctcgaccacactagagcgcgacctcctcgccatcagagtacgcatattcaactatgcccatacagctaccctgagctccagcataaattgacatgtcggataaccttgtgctatcctcaaattgtatcttaattaacagtcgactatataagaccgaatagcgaacaaaagggagagactatgaagtgtagataggaacccgggatcaaagttgaaattaaactaattctttaatgctcgaggggattgtatgatgtgagtggatgggaattgcagatgtactggctatgagagaaagacgatagacgagaaaaaaaaaggaaataagttacagtcatacatatatatactagaatcttgaatcttgaatagtctgagctggggattgtcacagcaccataaaccgtactaaagagcatacaggaagattagccgtctattgaaagacatcgaactccccaaaggatcaggaggacctgtaggagaaaaaatattgttgccgactttctattctagtccagttaccgttttgacggaggtagtcaaatctaagttctaggtgaacaaggtggaggatttctatacgtttattttttcttatctttcctggggctcaataaaatgcttgtacacaatctcaaattctagccctagagtaggataggtatccggagaagtggaaagtttcatattaatgcgaatgtctataaatatccttaattaattagctgggttacattcaccctgcatgcatatcgtactttatgcaagcaaggaatatacattaaagctaattgacatctattttaagaccgaaagtggccgatatgcaaactaattaaggaacatttgaactgacatccctgtcaagcgcagactgcagatctctgtcagctctcagcgctaacgggcaagccctattggtcggtggtgtgaacagctacaatgaatgagatattcaatagctggcacaaggccctttttacatctcttagagtagccccgttctgagactaagctttatatcccgacgccttccgctgaaatgaagtcctctcactctcagtgtcagactggctcgatcaaagtccctggtggactccatttgctttgctttgcttttattttcagcttgcgtctttgcagggattctttggagacccctccattgcccctcaagacccttgttcgtcgtcacctggctaccagccaatccacggcctttcccacttgtttgtttctgtattatcgcagaaggatacttgcattgaaagccatagaagtctcactgctctgccgacttgcaaatttgtcagctggtccttgtcaccggttgcttgttggttcttgttataacgcattaatatcaaccctgtcctatatttcccctctattattactctcctccccccgttagacgaatgtcatcttttgcttctgctggggggcgataccagagcagtgcgagtcgataccacacaaatctctcacagagatcatggcaggaatcgttaacggacctctttctctcttccgcaagtcggactcttcaaaacctctccatgctcgttggggggacgtgtctatctctgtacccacagatggctcatggaatcaatacgaaaatccccatcgacccgtcaaagagaaatcagcatacggaccaggctacgtgcccgactgctctccgcaagaccggaattcccgcccagtgaaagaggacgatccagaagatgattccagaagcgtctgcagtgcaacctcaacagcttcgcgacggagttcactatccttaggaggcctgcgaccgggccggctctctgtacgcctcgcttcgcgtcctagacaactacggggcaaatcacaaatggaaagagatgcccaacactccgaggaaaaacgaaatgagtttgcatatcgacccattcaacaagactacaactccgaagtggtcgaaaagaccactcagcccagcaatcgcttcaagtatattccgaccaacggacggtatattcaaagcccaggcattgaggctacacgcaacgcctactcgcggcgcggctcgtcatccgatttgattgatcaccgatacagcggtcgcgatcgtgatcaatacactccggccgtccgagtgagcaactaccacgaggacgaccgtcgcagtctgtatcctaacattggtgataattcggatagtcctagttcgcagcggaactatggactgccgtctagaccacggatgtcaccttcttttgcggctgatagcaggagagcttcttcaatctcgaagcctatgacgttagctatggtacctgatcccgataatctctatgagtaataggtctatgcggatttcgcttgcgtttggtgttcattgaccatcactacactgggtgttttagtcgttacagtttactggcctttcaatcttcgcgaaatgaaaccattcatcttctttttcgttatatttgcatttaaataacagtagctttggtggaaattattgaaaagtggatattacttcatttgtgatgtattcaaccttggattacggctcaatctcaatttcagcgctcttgtgacgtgcaactcaagtacttcttgatagcattccaattggcggattcttgctcccactttatcttgaaattcacattctaatcagggcagctgccagatatttgaacctctgtggcgatgtctttgaatatctcatcatgacgccatatcaacgtagttgccccggccaatagaaaatgccacgaaggagcgatccaaaacactttaattgtcgaatacattaaacaccaacaatagagaactcactatctcaataccatcttgatcaaaatggcagacgcagtagtccaacttcggtgtggtgtcaaggcaagtatattttgctaacatatctattctcgattctgatctaacccggtttaatagaacgatgactgggggaagaaaggaaaagagtcgatggtagctcagctatggtcgaaaacccccaaaaatggaccaattgacgactccaagcactattcagaagtaagcttttcggaattattgaaccaagcacagtcatgttgaccttcgagcagatgtggatgggcacgtatccttcaaacccatcccacttactttccacgggcgaacaccttggggactatctgaagaagcaccctgagctagtgggcaagtccgtccacgaccgatggggtgccgagattccatttctgccaaaggcaagcgcaaaatacaagaattatagtgtgtggccatgtagataactaacttggatctagattctatctttcagcaaagcgctacccttacaaatccatccagaccagaaactcgctacacaattgcacaaagaagatcctaagaagtatggcgatccaatgcacaagccggagattgcaatcgcactctcaaaattcgagctcttcgccggctggaaacccctgaaagacattcaatcgctgttcgagttgaaccacctggcaaagtacatgcccaaatccggacaattcaacgacgaggacctacgccaagtatgcaaggctttactcagcgcaccagccaaagaaatcgcacagacaatgaaagatctacaagccatcccggaatcccagttcggcgcacacacctacatccccagcctccttggtcgtctggcaaagcaatacggcgaaggcgacaacggaaatctggtcgccgccctgctgatgaactacatgaccctaggaccgggagattccgtcttcgtcccgcaagacagcatccacgcctacctcgagggtgatattgtggagtgcatggcgcggtcggataacgtcatcaacacgggtttctgcccggccgcagaacgcgacagcgtcgagttgttcgggcaggctctcagctttgtaccgcatagttcagaggattcgctgttgccgcgtaaaaagagcgacaagggcttgaatggtaagacggatgtctatgcaccgcccatcagcgaattctcggtgctgtgtactactctcggcgctggggaaagcgagacgcacaaggctattctggggccgagtctaatgattgttacgaagggttgtggtcagatgaaattccccgagaataaaaccgctgagttgaaggagggatatgttttctttgtggggcagggtgttgcgctggactttgtgaccgacaagggcatggctgttttccgggcgtatgcggagtaaagaggctccggggattttcggcgatagagggagaggaggggtgtggcagcaggaaaaggtataaactgtgtgatatttaaaaaagtgaacacttgcattttgccaatcggggcttggaagattgaagtaaggcttgcgttgtctcagattgtatgcaggcgccgaagccctaactgtgagggtttccaaatccggtaggagactcatcaaatcaaaagggccagccactcacactaatcaacacctttcataatcccgagccaataagcgatgattcctttttctgaatacttgatctatgtactctgtacactagtatctaatattgaattgcacggaggttcatttgctgatcgcgaggcgctttggacgaaccagtcaacgtacaacagcattgtcggcatcggcctcaactggaacccggtgatggcacatgtatcgacctgatttgtgctgcagcaggttaaatttagaaattagggcgcatttacaaaggcctagcccgacggattaggccgattatgcaggataatggaactaatgccggctaattttgtcaaagttttgattctatctatagctaattgatactatctttattttccccgcgaatcgctcaaaatatctttgaaacagggaccgtgtgtcagggacagactaagcttcgttgatgcgtttcagggtattaaatatctatatcctcgcagtttcaaagtatggattgttctagcatcaattgaggctcaactccaaaggcttactggtctgaatacaatatcgtggtggtcaaagctgcttgacttcagttctttgcttactttggatatctataccctggatgttttcgtggcaaacacacccccgttgaagtatcctttgcatactgggctatgtcaatcaattcctctcttgacccccgctccgataacaaccactattctcgctcccccgtcattatcattggtgcaatagctggcagcctcatcttcctagcaagtatgcagcccgagccgcaaccctccgaaagcaaactaacctaaaccagtggctggaagcttactatatctcttctcacgaaaagaacgggccagaagaagaaacgtccaacaatccgaggatctctcccctctcgaaccgccaccagcctataaaacggacgaactaggcacacccagaggtctccactccctaccccggcccttgtcttcctttgcaccggactacagtcgccaggcccagcatgtgcaagcgtaccaacagcagctctctcgcacttcatacgatcaacccccggcataccccacactgccaacatatgatccgtcacgataccagcctattcggccaacatccatggtgggcgatattaacgcccacacctatacctataaccccaccaatcatgccaatccacatcccggcccctcttcccgcttgagtgcagttcactacagtgacgccagactagcaacatcccggccagtttcaatggccgaccaagggcctccaattgggcccgtagctgttccaaccaggtcgaggcatcagccagctataccatctccaccggagcagaacgtcagacaggaacgcaaggataggagggaaaggagtgcatctgagccaatgatgttggcccaggccccaaaacaacctaaaccagttctgtcgcggctgatcaccaatttccgttgaggttatggattgtgatagtggcttgggcttggttttcttgtttttacgactatcacgacatgacgctttctgtttttgattatttggatttattcggccttggaaattgtgtttacaaatcaaatatattaaccggtgagaggctctaagtgttctccgtacagagtagaagacacctggtctgtgctataatctccgtccgatatcgatcaccccgagtttttccccttttcacatgcccttggcgcctacatctatcccaactggctccaacgcctcgatcatccctgagattctggtctctaattaattcttctctcagaacctgcgcaatctttgaggtactttgtgtactgtctactcgactatgcatattaatccttcaactccacttcgttgcagggattcaaatgcgtcacagtgaaacagtgctttttcgctttgagagagggggctaccccctcttttgatccctgtccttcacctggtgtttttatttctcattggcaatgactggtcaagaagaagccacttcaatatgtccatcacgccagttgttggaccaagacacctggattcaggatataaatctgccattccagatatctaaccccaactccgattatccatcgatggtctttgtccttgtgagtgcagatccctagacaagcgccatgccaagacgacgaacgacgagcgtgcgttgatacagacacactatatgcaacctatggccgacccgcgtcaaatccgtcaacgcatgttgactgcgccgcacctgtcaactgactatctattttgctgagaatggccgggggggaacagggatcgcaattacccctcccacatgcattgtctacgcacactgcagctataggagcctctctttacggccgcctgcttagatcctccagtcggccaagtgttcgccctgcaggttcgctcttttttcttattattatttttcgaagcgctgttgtttttgcgcattgcctctattctcagattctgctccgggggccaaccagaccaccgggttctctcccgggtctctaatcactcgttgggtcagttagctaccaacgccatccccgtcaagcacttcaccaagaagatcttcgctcttcttggtccgttggatatgcagtggttggctagtgcgcctccatggacgttttgttttgatataacttcaacgcacacgggcaatctatttgctctagtcaccttctctccatctctctttattcctcagccgtgctcgacttgtcgccctggggagagaacccatgctctctgtggggagtttgataagttctgaaatgaacaccgtactggggagtgatttgtcctcccttcggtaaattttaaccttgaacgcgtcacccttccagtccccatgaaagattggttgaaggctatggctactttcatgaagaagttcaaaaggaagcgcagagtgtccacagagctccactctcgctggggtgatgtttctatcacctatcccacgcaagggtcctggaatcagtgggatcaatcttctggtttcgtcgcgaatgcaatagcgagcaccaatatacagcccgaagcaaatcaacaatatccatccgccggcccattacgccagccgagttctagcgcctcgagcagacgatcgcgaagcacgggtatccgagaacaccaagtgggagacgctccatcctttccgactggatatttcgaccaaaacatacggcgtcgcgttggagatagagatacaaatacaccaccaggtccaggactcggccttcgtgatctgaggcgtgggccaaatcgccgaccctcaagctctattgacaatgacgaatgcactacggatgagtcatgcgaagaagaggaagaaagggaagagcgagatactccgggcccacggattgaattaagccctcgggaatacggcacgggagacgtctcacacagaacacgcgacgatcccgaagatttcgataccccagccaggtctcctccgctctctgtgacttcgcgcatgcgccgttgcagcctccaaagctgtgccacagagcctacaacgtctgtatctggtggcaacaactcgagacgaacaagctttacagctgcatcctctatctctgctccctctatgccaccctgcacgcctcaggttgcgtacaacgccctaaagcaacctcccttcccggagaaaagataccctccccgtacaaaacatcgggaacccgagtctgcgcctccacaggaaatggtgccgtcctatgatgagctctatggttgatatgaccccaaccaactacgtgcaactagaagtctatatgtggtggtattttattttatttgtttgtcggtgtcccagaccaaattggtcttgttcgaaagttctgtagtcgcccgtcggactcgatttgccttgattttgttcaatagttttgcatcatggtggtttatttgcaatttcaattatctcatataattatctgagcacaatattaaggaaattcacatctgtacgtctatcgtttgtccttccctaagtacgttgtactgggatctattacttcaaaatccggagtcctgtcttcccccggccctagcaagaggggtgttgcttggcatatcaaaactccaataatttcccgtcgctttcacactcgagggatgccgatagccgtttccaataggcctcgactggaatttgcgactttccttagatgagggggtgaacatgcgcccgtccgtgcatcatgcagacggtatcacagtcacaattgcttctcaccaatcaagcgtcagagttcatcacactctgtgcacctgcagctatccactaagagcaggaggactggtcgatcactccatcccaccaactgctcctcgattttccagccaaggtgcagtcaccaaccagcctataggcggcgttctctaagcgctgaggaccaacaccgggagtaggaagatgtgcttgattcgacgggcccatccttcccgttgcctcgcccgagaattagctgctctgcatgtgcttgatggtgcagcacttccctgtcatcctggccgtcatatccacacggaacggatcaagagctgattgcagtgaaagaaagaagctttcccaccccgagtaaagtcccacagtcccgagttacaatttaccgtctctcatgccaacgtgagatctctctatccggcactctgcccactctctcccacttggcggtcgctgtaacagaaaccgtcggactctgtttcactccggctcatcatgatcgggttaagtggcgacagttcactttcctctaaaatgctggcttttgtcctggctataattttggtgaatagcccagctctagtggttttcgggttgaaaactacaccgggttcgccctgcactgatgtgtgtggtacaacgaccaacactacatcatccgagattgcgtgtttggatcaatcatacaaccagacatcagtagggaaaagtttcaaaaactgcatctcttgccagttggacagcgagttcaacgatgcggagaccggagaatcagacgtgaactggggactctgtatgttgtaccaccttccggagatcgcagactgcggttcatcgctcaggtctaaccgatcgaacagataacctgcgatatgctttctcgacgtgtgtgtttggatctccagactcgatctcgaatgtttcgtcaccgtgcccagtcgcatgcgatggcgtgcgtttggcagttgaaacagacgttaaatccccagacacatcgaatctggactcgtggtgtgaaagcccgtcgtttgcagataatgtagtcaacacctgcgagttctgctacaacttgacaaccacccaagtttacatggcaaactgtatgtatgccctgaaacccattcctatatcatatgatatcagcaaatcccaagcccaaaggttcaaaaaagcactactaagcatcatccaccaaacccagtcctcgagtccatccgctacaactgccatttcaagacagtaacgggcaagaccttcgacatagccccaacgagaatcttcagccaatcgctcctcccctcaagtctctctctcacaacgcccactgcaaaatcctcaaacctgaatctgggagtggtgatcgccgtgccaatcatagcattcttaattatcgtctcatccctcgcgatatgttgctttttcttcatccggcaccgacgcaagaaggcccgtcggaaccgcaactcacctcatctgtacaaccactggaacgatgggtcgccgatcagcgcgcaacagcaccagcaggcctgggctgagcaacagatgtataattccggcgggtatggccacggttcaggctttgcatttgttgataatgatggccgcggacaggagcttgcctatggccctggccaggaccaacattatcaaagccagcagtatcagcagcacttccaaggtcaggacaagtcaaccttcacgcaggatattatcgaagagcctgcaccacaggaataccagcagcagcgtgctcaggttcctgctcgctctcaggtctttgacccggatcagaagggccagcatgttcaggatcctgttcatccgcaggtcttggacccggatcgaaaggactctcagcagtggcagtgattgttgtggcacctagtacctagttgtgctgtatagcatcgttgtaatgtctgtggatggcacagtcagttgaaggcttggaattaatgagatcaggatatcagctcccctattgttgatagcgtttgggtttcttgttttacggagttgttctgctttaggatcgcgtcgatatatccctgacatcttgcaatgtcatatctttggcgtatatagtttggtcaatagccaatgaagaaaaaagtgcccagcaaggctttcccgtcaagtacaataatgtactcaaagtaaaaaaggaagggagactgcaaaggagcagcatccaatgtcaccaggaagggcggcaaaccgacttatgtattgactgccagcccctctaccacctacatgtacacacataacaatccgaaaatagcatcaacaagccacagcaaagcaatgccaacgggacaagcggagcctacacaagccagactgtcagaaaatacgagaagaccggccatataacctttgagcgacagccttttgtgttccagcgccgctgcagattggccggccgttctgcaggcgtttcagcacgcaccgccaagggtccaggggtccaatggggatgggatggtcgaccctgatgttatttttggatctgtgagctgtgtggtgattttggggattgattattgggcgttggaggtattggatggcttgttgcttggtccttggtccttggggagatgggttttcaacttaggcgctgccacttgtccacctatgttgtaggtacattttttgatatagaatgaataaattgaaggattgcaattctacgagaacgtagtcatcgaagaaaagccgaagaaaactggggtaagacaagttgcgcccgttgatctacacttttatcttatcccaactctttaaccacccaaagctctcaactggccatgtccaacctcacccaagaacaaattaaagtcctcgagcaatcgcggcagcgtctcgtgcagctcactcgctcactcggctcgctgatcgcaagtctaaatcaaagcgaccctcttccgccgtggtaagagcgctaccatcccaccaaccccatccccagacctcagccaaatacaacgactatccagaaacaaactaaccccaaactaggacctccctccaatcccaagcaagcatcatctccaacaacctcattagcgtctccgaccaactctccgaccaacgcgacctcctctccaacctagtcgcctacccaggcccagagtacccgggccgaacacaagcaaacacgctcgagcaactcctccgcacaaaactcgatccccgcgtcgaagactgggttgcgcgcggccgtgcagccggtacagagtccaccgcagggccgtctaatttcagctccgattccgatgccgcgcataaaccgctgagcgatgcgcagctcgcggagctgtgggaatgggcgccgctggaggcgaaccaggaagcgcggcggaggaactggggtgggaattttacacttgaggagcgcgaggctgggattgagaatgttgttactgggttgaggaggcaattgcaggacgatgatggggaggaggagagtgaggatgaggacggggatggggatggggaggagatggatgttgttggcgttcatcggaagcctggtgctgctgagttcgagttcaatattgctactcaccatccgcatcctgttcagccgttcgtgccgctggatcttattttgagatatatgactactggacggatgccatagtctccgatctccaggcacttgactcagggcaagtagtctgtgtttacggctgtacttggtctacgatttcccatgaatagaacttctcgtagcatgttcttctaaatgcatgattccaaaaacggacggcaatattattcttttgaaaaaagcaaaggtaagcaacagccaagctatctaaccccgtcggcgagtagtgggtgtcttgacggtaggtctcggggacgctcccgtgctctgggccgatgatgccttctcagctacctttgcgcgaggagcggccttctgcttgggcgtcggtgcattccagtaccagagcatctggattgcgaggatcacattgagagagaagccaccaatgaaaccgtagaggataaacttgtcgtcgacttcctggagggtcgtgaagattcgggacatggatccgatgaggtagttgaacacctgattaaagaaataattagtgtttggactgggatcaggttgaaaggaaagagaatcgtactgtgaatgcactgagctgtccggttcctccctcgcgccagatggtgtagatttgaggcgccttgctagcaacacctagagcacccgcaccagcctgcaggtatgacatagtatgcgcatccaccagggtctggtcgaacaacagcgcataaatgctggcagctacgacagcaatgaaagccgcagcagcggcagagcgtccggcatagttcaagaccagaataccgatagcaatatcctggacggcgatgagagcagtctcgccataggtgctgaatgggaactggttgcgcacgccgtacgagagagtgatgagcaagctggcagtttcgagggcgtaagatacgaatgagacaccggccgatgagcgggagctgatcagcttcagaatctgtgggattttgacgactgcactggcaccgacgatggcaatgccgagggccttggagatggcgagtgatgtgcaggcagggtctttagtgagatcgagatcgaccaatagtgcaccgtggcaagactttccaatcaaggacacgacggcatcatgcactggttcagggatggctgagacaataggcgccaaataaggctgaagaggcgtaatcagggagttctgaaggatatccattttgacgagaataaacaccagaaaggaagaacaacagtattggaggtcaggcaatgtccagaagaacaatttgttgacattccgaagtcaacggatgtggcccgtgcacaaccggggaaattcaacttctttcgttctcttttcttccttctgcatgaccgacccgccatgatccccctgcggccatcccttctacgaaggcctcgagaggcgctattgtgctcgcaatgcctctttgggcctcgttctgtgcgccccgaggccaatcgggggttcctatcgtcctcgaaacggcggaccgggactgcggatgatcagtccccctcggtattccacaaatcatacttctcggccaatcgattctacgacgggtcaaatatcaaaggcggcctgctttcttcacttgcatcctccaatgcgaaaagcaaatcaaccacttcttcggctcccagcggtccgactgtcagtcaggtcaattcgtctgcaacagcatcgtccgctgcgattgcgacagaagcaacaccagaggaactaccacatcggcggcgaaagcgcttgaaggatgaaagcaacgcaaccggaaaaccagaacccagccttccgctggatgcctcggcgcaattgtcgaacttctcatccacactccccattacctccatccgccgcaagttggctgcgtatctcgccctgacgaaaccgcgactgtccttcttgatcgtcctcaccaccacctctgcatacgggatgtacccaatctcgtccctgcttaccctcgacccggctatgaccccactccccacactttcgacctcgaccctgacttttatatacctgacggtgggcactttcctgtcctgctgtagcgccaatacactcaatatgatgttcgaaccgaaatacgacgcactcatgtcccgaacgcgcaatcgtcctatcgttcgcggccttgtctcgcaccggggagctctgctcttcgccattggcaccgccgtcacgggcctttcactcctttatattgggactaacccgacaaccaccgccctatccgccaccaatattttcttatatgcctttgtatacacaccattgaagcgaatccacgtaatcaatacctgggttggcgcagtagttggtggtatcccgccgctcatgggatgggtcgctgcagcaggtcagacggcgacgattggccatgacacatggcgtgacatgcttttcagcgaacagagtatcgggggatggctgctaggtgcaatcttgttcgcctggcaattcccccacttcaacgccttgtcccatctgatccgcgatgagtataaagcagccggctacaggatgctatgctgggtgaaccccgcacgcaatgcacgagttgctctgcgctattctattctgatgttccccatctccattggtctttggtgggtcaatgtcgttgggagtggtttccttgtcggcagcactttcgccaatggctggctagtccgcgaggcatatcgcttttatcaacatcagggtgcgaacggtactgcacgtggcctcttctgggccagtatctggcaactgcctattctcttagtcggcggcctagttaccaagaagggtctgtgggatggcgtttggaggaatctattcgggcaatccgaagaggacgatgatgaatatctgtactatgaggatgaataagagtttgaaggcgagaaggctaagcaccatcccctgagctatcaaccgggagtactttgtccactgaatgagctttgaaccataagtctctcgtgctggatatcttccagcttcattcatctcacagagctaactccccttatctattcgaaccacatttttgttctgggattttgtcttatacggcggtttggagtggcgtttctttttcttgactttgtataacacccgtcctatatggaattcatacagatattttcattcttgtccttttcattctttttctgcactttgatcaaataccataatatacaagctacttcccttggacacgaacttccccgtctacacatccctatgtctgcagaaccctcatgtcagcagtaaggctttggacagcatggtggacgacaattgcagtctgcgaccattctccaaacaaggtcttaatattagggtattgtctgggagcctgtttgacgagcttggccatggtggggcggccagctgcatccatcgcttgacaggcaggtttgtcatcgatacagctagcaaaaccaatgtgtgacacgcttgagttaaattatatcgaccaaactttgagagtttcagcaccaaagcgggaaccttagccattcggccataaatagtatgagatatctaaaaaaggctacacggcgaatacgcatatcaggaggttggtgaactctttgtataatccggttgatgccgagaggagagctatgtattcaatgtcctagaatgccaatgaaacctcgggtatagtatagtacatcagtatagtacaaaatggattgtccacgaggacattgtgatatacaatggccagtaacgacggccaacatctacttcctcaacttcaagtgatacgtcttcagtgcttcctcggtcatgggactcggcgctccaaccatggcatcgtcgccccccttgccagtcttcgggaaagcgatcacatcacggacggattccttgccgagcataacagcaacaagtctgtcaaagcccagcgcaagaccggcatgtggcggacagccagatcggagggcatcgagcagatgtgagaagtctgtcaaccgctcagctggcatttttaggatgtcacggaagatgaattcttgcactgctgcgtcgtgaatacgccgactaccaccgcctagctcgacaccgttcacgacgaggtcgtagtggtcagccactgcctgggtcgggtctgtgaggaggaggtcaacgtcggcgggggtcttgggtgcggtaaaggggtggtgtgtggacgagaagcctgctgcgccgccctgaccgggctctgagtctgaagagggagagaagagggggaagtcgacgacccagaggaagtcgaatccggtcggggccggcttgaagcctactgagaccgaggcagcgtgcagtgcacggcgtagatcgccgatgggggttgagcccccggagaaaggcgcacgggggcgtgcctgcagaacgatcaggtcaccgtgatcagggtccaacaattcctcgacttgctcggcggcttcaaatccgaagggctgtagtccacagagcggctgcttgccattgtagacgaagacgcctgggccgccgtctgggttattgttgaacggcgcacctgcaggggagtcgaggaactgggtaatgaacttgtgagtttcagcgggattgttgtcatttccttccaccttgaaagcctccacgatgggattggccaggtcagaaatcttgccgactagatctacggggagaacatgatcaagtcgaatgatttccatcccgtatctcgtgtccggcttatcagagccatatttcgccatgacttcctggtaggggactttgcggaatgggccctccggtgcagggtctttcatcaacgacgaccaaagtcggcgaataaccccttccacggtgcgcatgacatcgtcacctgtcgcgaaagacatctccatatcaagctgtagatattcaatcagcatacatcaccatcaaccaaccaaccatgtagtaatccatacctgagtaaactcgggctgacgatcggcacgcaaatcctcatcccggaagcagcgcgcaaactgataatacctcggcaagccactagccatgagaatctgcttatactgctgcgggctctgaggcaaagcataagccagcccttccctccgtgtaggcacaatgaactcccgagcgccttccggcgtagacttgaacaacagcggggtttcaatctccacaaacggcgggcactgctcctccagctcctttttgcaaatattatgcgcgcgggcgcggaagcgcagtgcttcacgcagctctgcatctgagcgcagctggaggtatcgttgctcaggtgggaaaaccgtttcaggcgtcataattaagtctttaggaaagtcgttgaggggatggatttcttccaatgcgagctcccataggtcttgcattggtgggttctctgtctctgacggcttggtctttttcttttgaactatcccgcgcacagccacggggctattcacgttcacggtcttgagcttctcgaacgcatcgttcttggcgaatgctacaacttgtaggctatgttgcagggtgggatcggataagcgcacgaaggatagtttcttggacagatctgctcgatttccgaggtagccatgtagtactacttctgtgtttggctcggcctgtgcgaagaacgtttcgaagtcgtgggtagcaggagggaagtccactgagaggcatcatgtgttagccacggtcctcccagactatggagaaaccaagcttttcagcacaagacaaccacataccagaccgcttgtaagcctctaaaaattcaggaagccgtttagaaggctcttcctgtcgcaaataagcccgagcatggaactgccggggcgcctgaacagggctataacattgtctaggcgaaatggctgatcgaccccgcaggagattcgagatctcgatgtagctggatctcaaccgcaaattgcggagctgcacggcagcaattggcatatttcaattatattgaatgcaattgcagccaaatcggaagaaagcaagacatgcatgtccggacaacctgatcattaaagccggcagaaagccactccgccctagaagcggactagcgcccgcaggaataaaaagcgcgggattttcacttgttcgtttttcttttcttcttcatccttccaagttttatacttgtgagtattgctgttcccagccctttcaatgggcattattgatcgttatactgactgtttgacagaatgatgaaagcctagtgtgttatatatgagacagtctctgccctctgagacgtgcggctctctctcttcggggagcttaagggctgtacgaatcgagggtagggtatgtgatatatgcgttcggcataccaaccttgtttacacaacggacgcgatgaaggcatctctgatccatttacaagacttgaaggtgtaaccatgggctttaggccatggtttgagggttcctcttgaagcagggagagatggatgttggacaatgttggtgacagctcgttcatatccgatgtcctctctctcggctcttagattcgcatctagctagctatacctcatcctcccctatgtatgggctcttctcaacagtaggattataccagggtcaattgtatcagaggcacaagtgcctccgtcatggttgaactctccttaaatccacttataagaagagattggatgtttgaacaaatatcacggacttcaatattcagtacttcccgcatgtaactatgtcttgtgtttgacatagtacgactaacatagccatcgttataacgatctagctcttcgtcaaggttaaattttgaatcgcaacgacatattttgatatgctgctttctcccagcaagtaatctatagaaaacaaaccactcctaaatacagtcccctcatcgaatatttcagaacaccctttcacgcaaagatcattttctctaacacctccttctccccactattgtcaacgagattcttaaacacgccaccctcaatccccataagatctctgggcgtgccaaactcggccgctttcccagcatccataacaagaatgcgatcaaagtctgcaatggtgctaagccggtgtgcaataaccagcagcgtggtggcattgcggccgaattccgcacggatagacgtctgtatcaacgcatcggtctccatatcaacagccgaggtggcctcatctagaaccataatcttaggccgcgagacgatggcacgggcgagacagagcagctggcgctgaccctgggagaggttgagaccaccctcagagattgttgcagagagagaggtgaaagcgttagagttggttttctggaccgtcgctggtgtcgtggtgcccgtttcgctggcctggcggggtgtggcagtccgcgatgtgagggtgagctcgtcgtcgtcggcctcagatatgaggtgcacgcgtgctagcgcatcgtagagttccgtatcgctgtattcatcgaacggatctagatttgatcgcaccgtgccggagaatagcactgggtcttgtgggatgattgcaagtcggctacggagatcgtgcagtttgatcttggagacatcaagtccgtcgatgaaaatctgacccgagcgtgcctctaggaatcggaagagtgcaagcgtcaacgaggacttgccagcccctgtacgtccaacgacacctacccgctggttcttctccactgagaagctgagcccgtttaataccgggggaagatccggtgcgtagcccaccacaagatcgtggacctcaagatggccctctgtgggccaagccgcaggtgcatcggcacctccttggttctcgatctcgatgttggaatactcgataacacgctctatggcgttcatattcaattcaatgttagcgtattgcctcaatgccatcgtgattgcagcgttatactgcagggcaaagctgagagcaaaacccgcaagtgaagcgctcacacccggcagatagaccacgagcccagcagtgacagttgagaagatagcaccgatgatgctcatgcggaatgcgagccagcggttgaacagccacaagttccaccatgcttgcgcatggcgattgatcttgttgaacatgatttcgatgtaggtgtctggcttgctgaaggcacgaatggtgatcaggccagcgagactagacccaaactgctcaaacacggggcttttcgcagtgctctcaagacgtttgacttgacgggcaccttccaaataggatacggccaatttcagacagatgagcaacaggactatgccgagcaagatcaccatccagtcgacaagcatccccgcaatcattattgcgaaaacatctagtagcttacccacgaagaacccgatgtcgtatccgattcgtgaatcgattgagtgaaagtcggctgtgaagcggttgagaattcgccccaatgggacagtgtctagccaccggagtggcgcgcggaggatagcataaatcaagccattgaaaaggttcctcgaggcccgcaccgaagccgaaagaatgcagtaataacggactgtccctattatacaggcagtgatcgagatagcagcatatactcctaggtacatatagaggtcgtcatgttgtgggaccggtgcagtttctcgcatagtatgctgcaataggacactgtattgctcagggtgtgctttagtattggaggatgaacttgtccaaacattgatccaccaagactgtgataaataagaatcagataaaggacaacgacaaggggactgtcataggacttcatgcacttacccgtccaaccatgagggacgaaaacattaagtagaccgagagcgtcaccaaccaatagaccacagagccacctttattcaagaaagaaatgtaaactgctagccgcacagaaccggtttctcgtttttcatcttcaacaaatttcttcggtttcgtctgtgtagtagcaattccatttccgttggaagctgagccatttgtggctatgttcggtttttgatgggatgtattagagatcaccttttggagagttgtctcctcatcgttaaagaattcacggtcttctccatctgcaacaagatccgcttgttctgtggcatgttccttaccaaggatatcctctaaatgatgtgattccttcaggtcatcaatggtacctgcatatttgatacgaccattctccaacagtacggagtagtccgtgcgaggaaggcatagtgcaacatggtgagtaaccaaaatgcgagttcgattttgaccgagcttgccggtgagagcttgctcaaagacatgacgacctgtgtgggcatcgagagcgctgaagatgtcatccatgataagtatgccagccctagagtataatgcgcgggcgaaggaaatacgccagcgttgaccaccacttagattcacaccattcgcaccaatatcagtcatatcgccgtctggcaacatctcaaaatctttttccagagcacaagcaaagatgacctcttggtatcgctctgcatcgtctgggagtccaaagagaacgtttgctttgattgtagcattctcgatccatggcgtctgagcaacataggcaatggccgagtcgataatccaatttgcctttgtcgcaaggtggtcaaatcggtctttaatgggaggtggaacgggtacctttatcgttcctgcgaggacatcacattcacccatgatcgacgagaggagcaggctctttccagagccagttctgcccgataccacgcttagactcttcgttgggaatttcaaggtcatgtcacgcagaacgaaacgatcctctaaatcttggatatcttctgcctccgcaggccatgcagcagagacgtcctcgaaagcgatataatcagcagggacagtattgacgacattttcgggcgtagccagaaatttgtcgatacgttccgagctgaccttcgcctccagacccatcgacatcagctccgggataacagcgagggccacctcgagagaattgaagactgccatagccgtgaaagccacagaaggtgacaaagtaccattgataatggcgtatgtagtcaacgaaacagcggataatccgacgggaccgagaacccagatcgcaagcaggccaatatcagcaagaaaagaagcccacaatgcaccaagttcggtttctcgcgtatcccggacacgctcctgccattgttcctccagagctgagaatttgatttggcggattccctgcagcacttcggtaacgatcgccagcttctggtcacgggatttcatcaatcggtcctgggcattcgaatattttctagctgcgtatacattcaatggtgtgacaagaagagagaccgaaagaccggcaaaggcactgcgccagccgaggatttggaccagaaaggcggcaccgatcatgattctgaagatcgcctgtgggataatgtagttgagagaggcaaagtcggaaactcgccgagaatccacggccacatggttgataatactctggcggctcttctttaacacatgatcgtcatcgtcgtcgacttcggctgatcctttgctggaattatcggaattatctggcttggacttctttgtatgcttcacatccttccgtcgcatggctttggcaaatataactgctgacagctctgcgtagatcggaaccccaagtctagaatagaccacccagataagccacgcctccacgctcgaggcaacgaacaacaacccacccagggccaggacccagatatacgatgctccgacattccaatccggggtatcgcgcagttcgagtgtcttcaagatttgaaaaagggcgacctgtggtccaaagctcagaaagcaaatcgtcagactaagcgtagtttggacgagcagtgatctccaatgcgcagcgacaatcgctacccacaatttccggttctgtctggcagtttcgaatttctcacagagaaaagcagcacggttcgatgctgtaagcctggggatatcgtccaaatccatagtcttgtgcttcactgcgtagtttagcaagccattggcccagctgaaagtgaagcggctgagtagcgagaccgaaagctcccgctcaaccagcttatcttcatagtaaatatcaggacgacgcggtagtagaacacatggtacggcgcgaagagcagcgcaagcaatttgagccaattgcaacccgacccaaagtcgcccatgcggaaggccaagtcgggagaatatcaagatgcccagttcaatgcccggaaccgcaatggtaatgatactgccccagaaagcaaagtggccgagaacatatcggcttgtcggtcggggctcggcgaagaaagcaacagcttgaatagcgagcagaatctagaaagaataagaattagctattaagcttggcttaaatcgaacggttgtcggggtttctacatacccacactccaaactgcagccataccaatggcgtggaattggtaatggcgagcttcaatgtcgcaagcacagccgatgcgagggtgaccagaaatccggcgatggagaacagggcaatggcaatccgttgccatttatcagagaattctcggagggattcctcggtcgcttcgccatcttcatcgcggtagacgtctttggctagttggatgggctcataatcgcgcgatttgcgtgcaatgcggtgggcaatactccgaatggctggtatgctatccagagcaactagcgacaatgctagataggtagatgtcgccaagtaggccatatttttcagagacaaaaaacgaaagacaagagagaaaggcagacaaaagaaatatcatggcgttatcagcccccgactatagcgaatacgcttgcgcatgctagcgcaagctatagtgacatcgagcgggggaaatagaccgatctcagaccgccagtgactcaaaggcctcgcattcataataaatattaactgacagatttcgctctcgggctgtgtattgagtcacacgcatgcactatatcctgcagatctcgtgttcaagagtcactgtttggctgcacatcccctgtagaactcccgggctccgagattggaggtattgcgcggcatgtgccgaatagtatatcctgtactctctacggagtaagcactaagcagttagagcaattgctcactttcgcctcttccaatcccagcgaaatccatacgtccccacttgtatagcttgtacccattctccgtctaatgcaggaccggcctccacccgcgtctcggcacaaactcatccacggcctcgtcatccaagacgtcgcgccccaatcgcgccgtaataatactccgctcagcctccggtccgtgcacgtaaaacggctcgaagccttgtccgacgggtttagggatccacgttcttttcctgcctctttccttcgacccctcacttggatttcttatgatcggctcaaatccagaagcttcccggtctaaactgaggtaccaccgccgttggtggatcgagccgatcgtgttgttggaccctgggtaggcgttgtttctttggatttcaatgtcggcggtgtgggtatcgtctggacgtgcatgcctagccgggccggtctgagactcgggttgagatcgttgcggtgttggatccccacttgattcttgctgaccaggtggcggcgaaggcgatccagagtccgaggtcgacggcgcttgtggtaccgttggcctggatgggtgtcgacgacgccgtttggggccttcgcggatcggcctcgcgaaatcggttgttttatccatccgcagaataatagtgtagtcctttggtaaacgggttccatgaagtcggagtcggattttgcgcttggtgtttcagtgttagaggagtctattcagtgtctccatggtacagggatatacctacattctgaaaagcttctcgcaacttggcactatctgagatctgctcttccggtgcaacgtgactatcttcggagttctctgatcgagaatcatcggtctccgggccagattggtccatttgataaggtagaatttcatattctccagtatcccagataataagactccccgttttgtaggaagccgtttcaatgagatgattctgtgaagatgtaagtattgctattataccatctcagatcatcaacccacccatagacaatggattcgagtttcagttgcattccggtttaatcgctggctattcggatccccaggcatcccatacataaccgaccaactcacagagctagtctctgagaactggaggcgaagatcgtaatgcggccctgcgatgggatggtcatgttgatgaatgacgaaatgacgtccttctgggtgctcgtttcgtctatacagctcgatccattctttgatgggcagccgtggtaatgactgttttggaggtgggcgaacgtattctttgagctttgcggaaatcgtgctcagatggtcgatcacttcaacctggcctgcttcgatggcagcgaggctgggtgaagtgtttagttgtgatacgttcggcgggatggagtctcttccatctccatccttgacacatttgatggatgatctcttttttggcggagagacaggcgtattaaggctcatgagaattggacgctcgtcatttagcggaatttcttgtctcagctcatggtctgggctagtttctgggctgcaagcgcgtttcatgattagagcaccggagccgagggacgtcgtagccggtatcaagcgagagttagagccgtgacatgcatcgaagcagtggtattgtttgattcgactacaacctgcatgactttttatagatggaaacttgagttgatctcctgcggccacaaatggcttagtaacaagcttgacttccaaatttggaagctttcggtcaacgacgtcagaggtatgagactcgatgtatacgaagctacatattaatatcgtgagattacaggtggtgagagcgaattccgagacagaaaagttctagccaattgaataagtcaccaatcaattatatatctacgactgataccttttttatcttcagaatcatatctaacttttcataaagaatgttcaaattcatttcaatttaagactacatgcccgcgaaatacaaaaaaagcaatactggcaaggctagagttattgcagtgcctgtcaataaaacatatgaaactggagcccaatttctccccaagcagccctaattgtgagaattgagaatgggattaacagccacgctctgtgggttatggaagacatccttcggatcaatgagagtcttgatactctgaagccgtccaagattggatccccagtaggccatctggccattctcgaggtagggatcgacatatcccggataggaacgcagaggaccgggtggtcgattttgtatcaccacttgatgcaagcgatcgaggaacctcctggcaatgaatgcaggaggctcaaagccgacaacagcataggattgcatccacatgacagcatcacggtgaacataggccgtggcattcatgggaacatcgttggttgcgccaccttctaggtcgaaaataacccaccagttttgactgcccttcggtgcggtgtcgagatatgtaaacaaggcgactagggcgtgctcggtgaatagttcgtcaactgtgaacgatactgacttggagtagaacgacgtaagtaacgctccgccgatcgagacaagataattctcagccgcgtgggctaccaaggctagccaattcgtaatatatgccacattgccattgttttggattggaagattgttttccagctcaaattcatggaactcttctctagttccgaagaagctgcccgtgatcacaatcccgccctggaagattgtgagctcggtggaataattccgcgtaatattaggctttgccacgacggattgccaagctttgaagagtttgactttgtcaagaacatccccttggctgaatgtatacgtgtattgcacagcgcccttaggaatttcctgagtgcgaactttgaactcagtgacgatgccaaagctggctgccgcacccttgatagcccagaagatgtcctggttctgcgtttccgatactgtcacaatgctggaattggccaggactacttcagcctccagaacatgatccagcgcagttccccattgtcgcgacatgagaccgaggccaccaatggtgaaatgaccaccaacgccgacctgtggacaagatccgtgtgacattgctctaccacctgcatgcaaaaggcggtcttggagatcacccaaatttgtgcctgccccaatcgtggcgatatgagtgtccgggtccattgagaatttctggaagtctttcaggtcgacgacgacatgaccatcggctcctccaagacctaccatagtacggttggtttagcaagggtaggtttggatcaagaatatacttccataccgtaattgccatagctgtgacctccactgtaagcttgcacctgatagtttcctttaacagcacagcgcacaatttcagcgacctgggtcgtattcttcggataggtgatcacctcagggtgaacaggaatggccaagttataggatggcagggcccggaattcatatagaagatctccccgaaaggttgccatattggggtttcctcccacagcggccatgaagcactcacggccgacgacgctggatgtgttccccattctgaacgagaacggaaattgagggttgttccaatatggtcaagttgaatgatgtatctggaagaaaaaaacaacatatggaaggagctccataatgaccaatggaacatatagaaggggctggattgcgactgctttacgagaggtctgctgctcactccgacgtctcattttcggtgccacagttgttacatatgtcacgattgtcacattcattgataatactcaggaggtctcctgattctttgaagacattcgtctagagattgttactccagtcgtcttgtcatgctactgtgtgtaggggctggtgtcacacggcgaattagtatacgaaagcgcttgaggtgatgatatcgagggtaaatgttcgaataggatggtcaaccaatgagctcataatggcctacgtgaataccgagagatgccgaaagaaaatgctcggggaccactataactataacggcgacgtgggtggtccccgatccggaaatcccttttgacatggaagaatatggaaagcttatcttgactcctttgttcctttgctttttttttaaaaaacactgaatttgagaagatccccggttacagatctttccccccctgcattccttgggcgttcctatactgcagctatcataaaaattcccgtcaaaccccagattacacttcccgcaatgacatcaggaaaaaaatctggataacaaagacgaatccgcagagcatcaacatcatgttcaccccaattcataccacgctgggcgcactgttactattccacggctcgtcaggcctgctcatacacaacggcgccgtcttcggcatctcctctctcttatccgggtgcgccttcagcccgagtcgtgacaatgtgcccatcatcgcgggtttggtatccagtattgtgccggtgtacttgctggcaccatcactgatcccgaactatcccgcgtcgccacactcctgggcttctgctgcagcaacgttgggagtgggcttcctattggggtggggaacaaaggtgaggagtatcggacataattgcaaaaccaggaacaagttgactaagtgaagcagaacggtcaaggctgtacctccggacacatgctgtgtggcctttcgcgtctctcgccccgctcattgattgcaaccgccatatttttcacaactgcattgctcacggcgaacattgtcaagggcagatccaacatcccgtcctgtggtacgaccccgtgctatgctccagtgtatccatctgagtcggagttaggcttcatggctggtgcagtgctgctggcgggtataacaaactttatcgttgtcccccggaaagcccgccggtcggaggaatctagggtcatctattcctatgtgacagggttggaatttggtctgggtcttttcatatctggaatggcggacccagcaaaggtgctcaggttctttgccttcttgactgacccatcccgatttgatccgtcgctagcgctggtcattctatttggaattggaccatccctgattattttcctgattcagaaaccaggccaagcggtcgaaaagggaaagcctgttgcaaagcctacccttgctgagaaatggcgactcccgacggccacggtgagtgacatagattggcggtttgttataggtgctgcgacgtttggactagcctggggactggaaggtgtatgcccaggccccgcaatcttgcggacaatcctgcaaccaacttggggtttgatcaccatgggtggatacatgctgggcaacctcatttaaagggaatgggatatagagattatagaaaattaattatccattagctttgtcgaactttggcgtgttctcgggggaataaagtcgtaatcggtgcataacggtgcaagaaaagaaagtatggaagtccggagatctcaggagctgcatcagaggtttgattagcaaaggaaataataccataagatatgtacaaattcggttcaagtgagaatagatgccattgatctgtgaataaatgcattgggtatataacagagggaaaagactagacagggaaccgaaaacacagaggggtgagtaaacggaagaatggcttacaactcagtctttctgtccatgcgaagcgcttccaacttggccgattcgtcgtcactgcgcggactaggggccgatggatggccaaagtacccttccaactccatccactcagcaacgaagccagtaactagcatgctccagtcctcgacggtatccaaatctaaatgctcaccgtcatcgtcgattgtatgccaaacaggagggaatcccttgaagggggcatagtcgataagatggaggatctcaactccctttgcgaggaaaggaatgtgatcatcctggatgccacccataggtgagagcgtgtgcccatccttctcggtatcgacgaaccacggatcagccgagacagacttgaactgcttcaatgtcttgaaccgcttttcaaggtcgcccaagctttgataggcccagtgagtggtctcataccaagattgaattgtcggggatttcgagcccagcagatccaaaaggacaaaaagagatatagatgacagaggacccttgaattccgacatcgcgggatagacttggtcatcccaatgtgtagccaaggcacgagctccgtagagagaatcggtagaagtccattcttgaaaggcttcttcgccatctaagaatataacctgaaggccccgctcctcttcgaggtagttatatagtccctgctccttcaacgcggaccatttcttctccagcgcggcttcaatgctgcgcatggcatgcataatcatcgcacatggcgcagcactgtcgatccccccgatgaagcctttcggttctattttgctgtcataatgggcgacaagagtgagccggccaacgtcaccaaccgaggcccaaggaggatcgcgagtagcgatgaagtttcggaagggcacctccttcccctttgatagtggcgttttagctgtagagttctggatctcaatagtccatttgggcaatgtggttcgaaaaaagtcggcgaagtgattgagcaccgcggtggagccgggggtgccagggacgcgggtccttagtataggtgagagcagagcgccattgtgaatatcgaagtcgttgttggggcgtaggagctcggtcagcgtcttatccgatattttctcgtatgcttccacacacgctagaagcatgacaaaaagccctagccaaagtgacacattgccaggcgggatgcgataagccggagacatggcgttgaaggaaagctcgcgctaactgctcatgacctgcatcaaagcaatgatcggataaatctcaagcctagtccagccagataatcaacaatatcataaggtatgagatcaaaggagaatgtgtcaaagacctggcaggggtcagctcatctagcaatccagacggagcggaagctaaggcggtcacctttttgccggccccaatttattgggagatcgatcaatgtcaatgtctaaattccaagccaactacaacacatagacacaatgcgacttcaaattttacttcaccctcaattacgcacaactctaccagagtgtgcccagcgcagtcttcggaggaacgtctgggttcggttcaagtcacagatccctcggccatcgcagaagcatctttcgccattacccaagtcgaaggaaaccgtcccagctacgcgttctccagtaacaaggacgctcacaccgccaaagacaaccaccaggacaggtaccgtgaaccctcccggccagttgttagacgtgcgtgtgctgagctatagttacaggaccacctgaacgtatcttagtgtactacggaggaacgggtagagctatctttctggggacgctacgaatcaccacggtactcctatttggtgcagcgtgtctactcgttgcaccagcatgctccgtggctgacgattacccctggtatagcacacctgcgggtaagctaattgaacatccacatcgcctgagcgtctatgctgattttacctcagtgattgccgctggtgccctcccgatgatatttgtctcctatactgcggcgccatatgtaaatttcatccatctggcgttgccggcctttgcgaggaagtcccgtgaagctgccgtccagtatgcaaaagacctgcctccgacggccgtgctgtatctcaccagcatgcgattcaacaccattcctcggcaaacagctgttcgaataggagacctcgttccatttaaagagaccttgcggcccgtcacattccagaatctgaatccgtcgccgcaacgatggtggcagggcagagctccgacccagttctatactggaactcacagcaaacccgggagacaaacatcggctttctacccagaattgtggaatggaatctacgagcaaattcagaaagccaagtcgcagcctcgttgatcgaatatatacccgccacttgatggctgccgatattaatggtcagatgcccatttctctcagttggttgatcgacggagctaagtttcagtcactctaatcgaagacgtttggttggatatcaattgacaattagacacgccagacttatttcacgacatccatttaccctaaggttttggatctttgtcatatagaaactatccatatgaagtctcagtcacgcgttaacgaaagaagtcatttgcccttctttaggggaaaattcgtccgttcatatagtgtcgatatgcctcaaccctcatctagctctcatcttaagcaactctgaaccaaaggttctcaaagcaaacatattgcctcttccagtagctcgtgattgaacgtccggacgttaaatatccgtcatttccaactcggctgatgttctctttcttcatccacctccgcgttaacggtttcacttaacgttttcaagcacgattcacatctatcaaatcttggttttccctattcacgtcgacgcggtttctccttctcttcctcaccacctccactcgcccatacaacttccttcttccgttgtacacccgttacttcaagttcaaatccgtctcgacgctcgaccttgactaccaaacttacatacaatctaacccggctaattcaagatgtcttccccggctgccccgaaggagaagctcttcaccggtatttccgccactgagaccaagctcctggtcttggccaatgtctgcctgaagaatgacaaggtatgccattaatcctaggttcgctcattggaatgtgcttgctaatacagtggaccacaaagatcgactacgagaagcttgctttgaacgctggcatcaaggcgtcttctgctcagacgctctttcgcaatgccaagcgcaagctagacaagatgtacggcaatagcaatgctgatgccaatgccaacggtgccacggccgacctgtcgcccgaggagactccctccaagcgaggaaagtccaccgcgaaggcgcctcgtactccaaaggttcttttgtcccccaaggcgaccaagacttcaaagactgtgaagtcccccaaggcgaccaaggcgaccaagacctccaagggtgacaaggccgctaccaagaccgaggagagtgcagaccaggtttccgccaagcccgagcttagtcctaccactgcaaagtccgctgctgatgtcgctggaggtactttccacggggccaccgtcactgagcctgccactgagccatccgcatctgccgccaccactgagcagaccgagcaagatgaggaggcaagcgacaagatcgacaacaacgacaaggccgcgcgtgatctggtagtgaaccagcaccttcctgagtctctacttgccaaagaagatgatacctacgaggaggaggcgcaggaggatgaacagcaccaggattaattctatgctcagcaactccgaaagcacaaggtatcagatttgcgaagcgttttttctaccagattgctaggaggtggttcggaggagtatgtgatgagggaactgtgaatgctctttaaagaaaaacaaaaaaaaagtgtctattggggtttagtctcaaggcagtgataaagcattcaaataaaacacaatgaatattgtatttgctattctagctacgtatacgtatgccatattcatacatgccaataaccggggattttatttgtggcgcctgcagtcaactggcgacccagagcccaacccataaatgtctcttctttcagggagcagctatcggttctttataaacagttgattgattctagagtaactaagatcatgccagattggtgtatatcaaagttcgctagaaggatatggtatctagcagttcaatctgtacatgtccatttttatatttcccatctccagtccgggaaactcgatatcaaattggatgaagaggtcactcgagaagctcatcccttcagtttattttattacttcgatgaatgcaatgtctcttccgaagtgggatccctcagtcttgcgaccctatttatatactgacttctcaggtcaccttgagagtttatcttcaatgatcacttgctttttacacaaagcttgcctttacaatcgtttcaacttctattactgtcccacgtcacatagtcatcatgtctttcacccaaaagcaagagaagacctccaacctggtgaaagccctaggcctcacccaaggctagatggaacatttcctaatgggatatctgtgcatgcaaaagcccaaggtatgtgagaaagtgtgttactccgtgagtacttaagcttaagaatcttcatgacagattgatcggaagaagctcggggcgcttagcaaggttacgccttcctccgtcagaactgtccacactaagggccggcgcaccctcgagaaatgggaggagacggtgatatccggggctacgaagaaagccgaggaacatgaacgaatcgatgaggataaccctgatgaggctgtggaggctgcacatgtcgaggataccgagaattaggaaggaatgaatagccaactttgcaacagtcagctagtcttgaggttccagggagctgacatgtgttgttcaagatgaatccaacttatacataattcgaaatccataattgaaataagtacaaaagtccgttataatataggctgtgaccttcgagtctaatatcacaaattcccgatttccacaaataaagtacaagtaagcgttgcttcttcatcctcttcactacacaacagatcgttttccatagcatcaatatctcacaacaacctatcttcagtgcctttgcagagcacaataaatccctatctcatcaagcagacaaagagcccatacatatgtcacccactgagaaaatgtcgaccacgccatcccccaaaaagaagtccggggactggggtaatctcacagccggtgaaatgaagctggttatggccagtgttctatgcacgtctggaaaagtatgcacgctcttaatactgccttcagtcatgactcaaactgactgttcctgtaatttagcttgacaccgacaagctcggaaagctgaccagcatgaagagaaactcggcagcgagtcgatttccatccgccaaacgcaagctggcgaagatgtttgaggatcagttggaccttataggcaatgagaatgactccaatgtgaaggaaaaagcgccagctagagtcaaaaagcgccgtgacaaagttgttgaatcacccgaacctgaacccgaacccgaacttgagatcaagatcgagactgaatccggagagggcatgagcaccgacagccccgtgaaggctgaagctgaatcagagaatagcaaggttgaggccgatgctgatatcaaaatcaagcccgagcctattgactgagtcatgaaacgtgcctatgtctgagacgcagtctctctcaagggtcttgattggggtcttgagaagggtgttctcacataaatttgcctaggatctgtgatttgatttgaccaaaattacccggcagaaggcgtcttaaatgcatctagtttgtcctgtcccatgagaatggctgtggcatatgtttgcctggcaatgagaactcattgcacaataatacgatatggctaccggtaatgtgttcagacatggtgtgacattctagataatggatttgaagtaaaaacatactttgctatgggatagatattcacattcacgggaaacaagataaccgaagaggtccagtgacgccctctgaaccaacataaaaaacgacaaacgacacgaacggccagttaaagtgaaagatagacacaaatatcatagacccaaattatgaatatggacgcaataaagaacgaagcaccaccgaataagtatctcaatcactaaagcgcctcgattgccttcatcaagacatccaagccgcgatcagagacatcgcctgcatttgagtcttcctctgtgacagactcgcgcagtgcccaggccacatcactccaccagcccagacccacgaagccaccacccttacggcgctccaggctctctttgagccggctagtgtgttcccactgcttggcagcagtctccgcacgttcaataattttgctcggaatcccacacatagatgcacagtgcataccgaaactgccttctgcgacaccattctcaagcttgtacaggaaagccacacggcgctcgacatcgtcgacatgaatggccatacgcttgggtgcaatttcgggatgattttcgaactcggcagcaagcgagtggtagtgggtggcaaagaagcccaaagctccaatatgggtagcgatgtgatgaagtacggcctgagccacggcaacaccgtcataagagctagttccgcggccaagttcatcaagaatgacgagtgagcgcggagtagcctcggagagaatcttctttgtttcggacaactcaacaaagaatgttgactgggcagcgaagatgttgtcgttcgcaccaagtcgagacatgattcgatcgactggggtcagtcgggctgactggcagggaaggtagcaaccgatctgggccataatgacagcaacacaggtctatacttgttagcaacatcattaaaataaagggagaaccgaggtggacacaccattcggagaacagtagactttccggcagcattagcaccggtcagcaagtcaatgctagcatgtttgccgccgagctggatgtcgttgggaataaagtcctcaacagaggaaagaagacaagggtgacggagctcttcaaactcgaggacacttcgttcgtcgtccacaaacactggtcggcaactaggatgaccgatggccccggaagccttagctaaactgatgaggcaatcgagctgcgatacaattctaacagcagccagccatgtgctgtaatgctcatcgaaccgggcatggaaccgcccagcgacctccttgacgatttgactgtgggtttcttgggcctcttgcaatttgcgaatgaggcttcggagctcgggaaagtagtatcgcttgacctgcttggtcgcagacatctggttccaattcttgggaatattcttcactttgatgggaacttcgagttggtaaatttccttgccgttatcccggtagcatatagcagaggaccccaaatctcggcgagcttgcttcagcatggcgtcgaggtcccggtggagttgctcaatgatctcctgggagttatcgaagtcttcttcgacaccagactccggaacaagaatcccattctcttttgcctttggacgatcgaatgcggtcttccagtatcccagcagagaggcaagatcgggcatcgctgttgtcaattgaccgataatgctttcgcctgagcccgtgtcactttccttaaggagacccatgatgtaatcgatttgttcgaatccttctaggacacgtacaaagtcttgagccttgcagttgccagcgtggatacgggagatcagtcgttcgagatccggcatctttgttaattgggaggagaactgatcccgggtactgggatcggagttgagtgaatcaactgcatctaatcttgcgttgattttctttgaatcaatcaatgggtggcatacccattgcttgaacatgcgtttgccgaagggcgtaatgcatcggttgagcaactggaagagagtgccctcagacccgccatcgaaggaattggcgaagatctccatgttgatcagggtctggccgtctagtacaagacttgtagccttcttgatgggatcgtaccacgtgaagttgccaatggtgatcaagtctcgctcaatcttcagcattcgcagatattgaaccagagcaccgaatgcagacatcagtaattccttctcgcgagcttgacgcagggtctcgggccaggcagtgagattatcgtcgtccacagagacgaaatactcgcttgcctcaagctcccgaacagtgatatcagattcccagaactccttaccaggtttcatgaaattccagatagtggtgggtccagtgttatttttcagaatgcgcatggccttttgtgaaacgcaagatttctccagtagcaactcccgagggcgggtctgcgcgacaaaggtttcgaacttggtcatgtcaacatcgtccacaaactcagacaagaagaattgaccggtagcagtatcgacaaacgcgataccgaacgcgggatgctcgtccacaatggcctccttaatcgcaacacagtatgtggacatatcatcttgaagcatggaaccctcgaccagtgtacccgcagtaagaacacaggcaagctcgcgtttgatgatcttgtcttctttggtgggcttcttgccctctctctctcgcatttctttacccagcgcggattcagattggtccacacgggcaatcttgaagcccttggccacgaattggttcgcccagtgatctaaactcatctcgggaacaccaaccatgcgcatgttcactctgtccgtgagcttgagatcaaaaagttggtgaccaatagtggcatcgttctcatagagttcatagaacttgcccttcttgaagaaaacgacagtatcccagaatttctgcttgatctcccagtattgtttctcgaaaggggaaaatctagaccatgcgagcggagggatatagacagttcgcgggtcgtagtcagggtggcccttagggttgccgtcgatgtccttgagattagcaagccatgaatagcgctgctcaggctccttgatgtgggccttttcctttttcgcgctagatgctgtcttggtagacgctacagcagctcgttctttccgaggttctgtattctccggatcaaacgcccatcgcatcgcggttccagctgaaccttctccctctgggacatcaaggtcgaggtcatcatcgggtggaggaggagcagggacggaggaagatttagaggtaggcttccgtgccgattgtgtggatggtcttttcctcttgtttgaagatgtaaccgtctcttcatcagaatcatctgcaacgatgaaatcgtccaattctatatcctagtcagtcgtgtaccagcaaacccaaccagcaaaagaataccataccatcatccgagtatcctccatctcctgcctcgttgaactcatcttcgctttccggctcggttcgtcttctcttggtcgcacggccggagacgcggtccttgcgtttaggacggaagatgacctcgtcgtcatcctcgccctcagagtcagactccttgtagctgacctgctttttcccctagacagatgggttaacaagatacatcaattgagcaatcagatgccacacgtacccgacgcgaaggtgacatagtggactcctgttgtgcctctttggtcgtctaggaagggaaaagttcggtcagattaaaggaataaacaagcagcagagtccgaatcaatatacctttaaagaactaccattttcctgttcgtcctctgggactggaaggtcgctgcttgggacgggactcagatcctgcgcaaagcttgagaagcttcgcttttgttccttcggtgtgggcttgacagcgccctcactccgcttctcggaagctctctgcgcgggggaagatgccggttctcgcgttcgactattcgagggggtcgctggtgaggacttttggaagaaaccaagaattgacttctgggttcgcatgttctgggtgctgggagttgtgcgcttgagcgcgggggatggcgacgcagcggacggagatgaggccgatggtttggccatacttttcttatgagatcaaagcaattgagatcaaatgaaaatacactctcaactcaacatagtaatcaggggagttgtgagggaattggggacgggtggagataaggcgcggatcgcgtcgacgcgtaaagcacttcgagactcgacctatccattgatcgacacccgtgaccttgtcttttctccacctgttatgagcacttgcgaagtcttatttgtctttatgaagatggcttgataatatttatactattgtacagattgaatattgtagcattacagatttagtggagattcgccttagtccgacttggtcggctcagtcggctcaatctactcagattcagtctcccatccaggagccgtgagaccttgcgcacgatattcttcatcgggcacaatgtgaacagccttgagcttccacttgcccaactttaacattagaaggttgccgttcaagacaaactcctttgttttctctgcgtcccacggccggataggtgtgaaggataattggtctgacatggggccactatcaccaggacggctgccgactttggcgccattgttgacgatgactcggtggccctcgctcttggatgaaacaaggccggctgaccatagaattttattgaacggctggttgaaaaccagcgattcgggcagtgtgaccttgaaatctcccatgttggcccaatttgtttggggggcatatggatttccggactgaggagtcgagaagccagcggtgggggattgcggatgaccagattgaggagaggatgacttgggaagaggagtgggctctgcggttgaggatcggggacggaatagctggcgatgttggagagccacggcatcagcttcgaccttaccatggataagctcgacaaactcatgcgcgagcttgtgctgcgcaacgcgctgagatgggtccttgttctgctcctccatgatggtagcgatttcaggcaagggtacgaaagtgaacatcttgagatattgctcgacaacatcgtcaggcgtgcgcacaaagtactggtaaagttcgaatgtagaagtcaggtccttatcgagccaaacggcgtttccagcagacttgccgagcttctcgccggacggggttgtcagaagcggcgtagtgaaaccgatcgggcgatctaattctgattctaatggattgcggagttgttcgtcggcagtgtttcggctgatagacttgacagcctccataccgaacagaatatttccatattggtcggcacctccgacttggatttgagtgccctgttggaacagcgtccaccaatcccatgcctggagaataggataggaaaactcagcaaatgacatgccatctccttggttcaatcgcgtcttgacactagtagaaaagttcagtaaacccgcgtcaacagcactgtcggacctgccaaaactcacgtatctctgccgagcatgggaccaagtcgcatgaaagcgccaaggtctcgcaacacttcaaggaagggcatcgagttccaccaagtgttgttatttgtcaacgcccgcttccacattgggttcttctcgtgtccgtgtctcctgccgtagtgctcaatgctcgagcccaacttcttcaactgcatatgcatgctagccatgtttgctttccggattgaggaatggacagcatctcggcctttgaggcgcccgctggggtcgccgactctagaagtagcaccgccgagctatggagtattaggttggtgcattcaatttggcgtgaagtaggcaacttactagaaatgtcacaggtaatccccagacatatccccaggccagaaccatgaaaggaagcatgtgtccaacgtgcattgagggggcagtcgggtcgactccaacatatattccaacccgcttctctgtgaagaccttgtgcaacaagtcccgttcactgtaatcgaaaggaaacgattagcgagccattcaaaacctttccggcagcaaatgccagcaacttcattatatcctagtgtgcacatacccgacaacatcatggatcaatcctcgctcttccaagtgttgcgcgaagttcttcctcttcccggctttgatctcctccgcgaagccggcccattcctgctccccgtctttcatacgctggatatacttttgtgtaatccatctctgctgttgaaagcatgtcccggactgcaaggtggacaatactggccgattgctgtcaccgcgcggcagaatcgctgttgttgcggcaaaactgcgcgctccgcacgggatccgacggggtgtgagaaggctgcggtatggcgctgggccgagcgatgccgactgtagtcgcattggaccggtgtgagaatgaggatattaataaaacggctcacaatggactcgagtctgcacacgatcaacacctccagggccagctccagatgtccgagattctttcgatacgtgcggaacattaatgatgcggcccttatctctgatatgttgattgatttcctaatttgggctatatttagggcttagggccagagaagtacatggactgggattcagatccgtgattgtagagaaagatgccatgttggaataatactctctccatctagcaaacaaaatggtaaagtctttaaagacgactggcttcaagtgctacgtcaactcacaaaaacctgcacgaatgcctcgttactccatccactgtccaatttcatcgatttccatgccgccaatatatcgattgccaggacattagcattctctccaccttgtttccataccgtattctgtggaactggtcgtcccaaaatcatgaccatgaagtttcgtgcaatgctcctgtcttgaagatccgagaaatagatccccagagtgcccagcgcttttaagctgatgtcaactcgtaaacgaccattctcaacaacagatatatctgaagtcactatagccgctacaccagtcatctttcccaaaagaccgagcacagccacgtgtgtcagacggtcaccagaagagttgccgtcatggctgcccgtcagcatgaacgactgagtcgggtaagcagtgaggatctcccagccctttggccccagaacaactgataccagagattcccggctcaacggccgcatgcgatgcgatatcctaccgctgctgtgtgcacgcacaatatactggccttcggagtcctcgtgaattcctgggaaatccatcaatgggactatgatcgaggcctcggcagattgaatattgaaaacgcctaagattccacttccagtcttggcccagccggtatagcttccaacgcgcagaacacgtccttcgtcgtagtcgttgtatatgtctatcgtgcgtccaatgacactaggacgcaagatcaccgtgattcctttgacagtaggtgcagttatctgattgagtagggccaggtcatgtttacccggctcatcggtgatataaattggccctccggatacacatcgagctgcagcgtggaatgacgcgtataggtgacttgtttggaacatatcccaatccggcaatacgttcaaatatcgggtgagtaatgcattatgagcattacaaaacacatgccatgggtgagaggcaacaacatctggaaagaagtcgtcggagtttcgcaatggaatagtgggcttgttggtgggcatttgtgaatggaagattatttgaggggtcattgacccgcatgagattgaccgagtgctcaagtgcttaagtgatgcgatagaccatgcatcttgataagaagtcaagaatcttcggcggtccgctgggtcatcaaggaggtcaaggaagaattgtgcatctgtcttgaccgagtctataccaacagacgtaaggtagtcatagaactcatcgtagaatcggttgatatcatcgggatcaatggcaacgattgtgccatctagagggctctccgtgaatgacccattggcagctgcgtctttgatcttcacttgctttgttttgaatttttgggctagatccccatctggtgagatacctccccaataacccagcaaggcatgccagaccgcgatatggtcgatatcgggatgtgatcgacgaatagctcccacagtatgcttcaatccttccggaaatcctttcgggtgtgcttcgaactgcttccagccttgcttgaactgagactgcccttcattgtcggttgtctgccagccatcatcgataataagattgacgatgttgatcccattcgccttcaacgagtctaaggcatgcaagatcttctcttcggtgaggtcctgtccaagcccattccaggtacaatatgtgagaccgtcgaaccactcagaaagccactgtgcactcgggtctttctcaacaatgaccatatcatcaccagggggagatagtgggaccgaatcgtccaaatccagattactcgtatcagcaaatggcctgacgactttccgtgcctcataaaccactgcagacatggcaacttcaaagttttccgctgcgctaacaagcacatggaattcagatgcttctaaatcgtcactttttgcggagatcacgacttcaccgttcccacctgactgaaacacggtcaaaacatcgttgactccagaaacggccagtagaacaagattcacgccatcatcacgcaggaaagagcaaaatatcgcatcttcagtaagtcgaaatttatctttgccatgtctagggccaagccatgcgctccccacacgtactagtgagaagtacctcaccaccgacgaagcggtcccaagtgcaagttgtttgatggttgaagatccatttcgaacagcatctgtatctccagaaagagcccagaggatcgatccaggagcttcactgggtcgagactcaatccgcaagtcaccatgaagattatcgatgtacttttctagttgctctttgggagctcgtgcagcgacaccagtggacacagcgttgtcaagatcagagtagcgtgcactatatagaatttcaccgtcgcccaccgggtgtctttgattagcccactgccattctgtgtctgggctggttcggaaccggactgtgaactgtgcatgacctcctggggctggtaggattatctcttctgagaatacatagcgatgatagttgtactcttcatcgtttccggacaaaagatcagcatgatctgtgttacatctttgcaatggcagatgttcccattcggggccagtgatgttatgccagatctgtgcttcccatgattgttcggggaatgagccgctggactcgatagtgaccgtgaaacgtagctgttgacaattttagtattcctttgcattacaccctcaatcatttcagaaagtctggcaatatcagatatgaccatatttgggggactcaccgcatcttcttccaatcgcgatgccttcttcgccgtttggagacaagtgatttgtcccagcggaggataggatgtgacacgtgcaaacatggccatttgagccggataaacaaatgatgcttgtagctgtcgtgcactttggctagggccctggattgggagggttgaggtatctctattaatgacctccattgaagaaaggtaggttgttggatgaggtatctcgcccaggaggcggaaataagtattaaaaaaagattatttacgaaatgtctcacaagagactatagaaaacttgtatgcttgagtgtaacagaggaaaagaagcaggtggttggttttaactcctgcaggggacggaagtggcggggaagctaccactgtccaaccagaatgagcctcacctcatctcggacatcaacatactattttcgaattactaccagtttttaagttgactgccttcttgaaaactgcaaagacactaggatagttctaagtattgtatgttctccactaataaaaacttcattgtttatttgagatttataaacaggatgaatgaacataaaaaaaaggtaaatgagagaacgacaagagtcgaaccggaacagtccaggtagtggaagatcttaggcacttccctcgtagtacacgcaaagcatgttaccactgggccacccgctgttgagtcatcagtagtagcttccttttccttgtctctcgcactttccaacattagaaagttgtcacaacggatgccagcaagacttatgttatattaacgctgctccctagcctcttttcattccacttcttagttgatcttgatagtcaactttccaaagtgcttctgggtccactgaatttcgatctgttagcattcaatccctccttcctaattaaaaacaacttaccatatgatcataggcttcccgtgtctggtcaagggtgaacaccttgtcatccatcaaagggtggatatcattagcctcgatggctcggaccatatccctcatgagagctttgctaccaacataaacaccacgcacagtgcagatgtgagtcaaggcctccaaaacaaccggctgcttcttcgggtctacgcctgaaaggaacccaatgacactaatgacaccgtcgtacttaatacacttgaagctctcatgaagcgttccgctgccacccacttcgacaatctggtccacgccagctccgtcgggggtcagcttgcgagcagcatcgccccagttaggctcagtcttataattgatgacatgatcagccccaagcttcttgagcctctcggccttctggggagaagaggttgtcgcgatgactgtcgcaccagcaactttggcgaactataaaacaagcagcattagccaagtctattatgaaggagagcagatgagtttggtactaacctgcaagctaaacatactgacaccaccagttccttgaaccagaacggtctggcccggcctcagaggcttcaggccatatagtgcattccagctggtgagcgctgcgcacgggagggtgctagcttcgcggacatcgagattttttggcgccttgacaagacccagttcattgaatacgccatattcacgcagggtaccgtcgatcacaccacctagtccagtattcgctgcgtgtatgtcaatgtcgccgtattggtggccctgattgaagagagtcgcaactcggtcgccctttttgaattcaacgactttggatcccacttcgataacttcgccggcgccatcagatcccggcactacaggcaaattgagaggaaatggatagaggccctgtgggagagaagttagaggccggttatggcaaagtaatggtgttgcgcaaacaattcagtcaaagtataaaatattggctttctcgtgcaaaggccatacctttggaatggttaggtcgcgatagttcagcgacgcagcttggagcttcaccaagacttcattttcaccgggtttgggaacaggaacatccttgcaaacaagaccgtcgaagtcatgtttgtcatcttcaacaatccattgtttcatagtggaagaaggcattgtactaaaatgtatcaatatattcaaaaaagtatactacgtatgacaaaatgagtatgggggttgggggtttatattgaagccctctgacgtatttgacgtatcggcagatgcatccgtccgatttcagtgaccttatgacgaaaggattattaagaaggtggatatctgcttcatgtttattggtagccaagagctcctatacaggttttatgatgtgaattattaactgataggagatattacctttcgaaccttgggatatatatcaaatcacaaggttgagtagggaaatatgtaattcggtgactcggctgctgcggatcatatatccgctaataaacaggtgatcttctcacagcataatggccttgttagatgcactgggattccatgtaggtggtttaatccggcgaacatggtggcataggcgtatccagggagaagagcaaagagaatgagactaaaaggatttgatattcaaagacggaaggatagcaagaaatgaggattgttctccagggatgaagaaggtaaaaatataggatgaaggacaagaaggggataactatatgtatgacaactcaaatcgggcatataacttcccgtcaaaagtccggggtcccggcccctcaccagaacatccttcaactatgaaacgcaaaaccctgtcatacaagctgaattaagagactatcttcctctgacatatttttgaactatgccgtccgtgaaagaaggccgagtcgagaaatttaaagccaaaacaccgcgaaccacaacccgacgcgtgtccagcaaaagtgagtaaatacaccactgtcacaagcatatttcatcctcaaaacatgttttattgatttgctttaaccaaatggcgacgcgtgctaataatcccttagtcccactggttgaacagaccaacgcattatctattagcgacttcgtcgcccaatacgtgactccaccgacgcaagtaggagattcagctgaaaatgatgcgattgatcaactacatccatctcaagatcagccacagcaggatatgatccccatgtcgctcatggatgtctactctgcggcaactatccccgcggctgatctggaagcatgtctggatctgatcgagcaaacctcaagtcaagcctacatggcgtcgaacgcaggctggtcacgtaccaagaagcggaaggagatgaagttgccagatatgaagtatttgattttgcgggacgcgccgaatgataatagtgatcctagtgggcgagttccgagagagaagcagcgggatattgccgacaacaatgctccgtctccacccccgaaggaacgcgaggaatctatttcatcgcctgatactgtttctgggaacgtgcttggctttttatcatttatggtcacatacgaggacggaaaagaggttgtttactgctacgagattcacttgtcgccgacggcccggggacggggcgtcgggaggttgcttattggtcggatggaggcgatcgctggtgctgtcggcttggagaagtctatgctgacggttttcaagtcgaatgaaattgctcggcggttctatgagcggcttggttatgaggttgatgagtattcgccccgaccgcgcaagttgcgcaacgggactataaaggatgttgactatttgatcttgtcgaaaattttgaaattataatagctggatatctctttgttaagggtttgaatgctaatagtggatatgaggatagtggcgtgcatacactacacctgtcgcacctctgtgcccacttgctctgggtgttcttgctcccactcgtctctgagagcggcaaagatggtgtcggccaggaggatggagaggcccaaactccagactagagtgatggcgtagaagaaattggcatttccggatcctgcgtagatccaaaggtggtagaaagccggaccgagaagactggagtacaagattgccgagcccgcaaagaaggtataacgcatcactgtaccaaattagtcaagttgatcctgagatatgctcaattattggaaatactcacatgggaaaaggtggcgatataatggtagcaatgcgaagaacagtgatgcatctgagatgctagggtatggcttgaacacggcgaagacacccaatagcgaggtaatcacgaataatggctgacttcggaagcgagcagtgagacccccgacatagctggccaaatgaagccagaaaacgccgaggaagaactctcgaaatgagtcgaacatctcaataaaaaagtaccaccacagccccacgttcggagtcaagtctggaaccaaaagatggaaaccatatgttgccgagataaactcccaaaagttgccggtgatcagacaggataggccaagcaggcctgccacactggctagcagtaggatagcatgttggataatgaacgatccagcactgggtgggctaggtccctccaaccgccggtcatagcatagcaagaccaacgggataaatagcagcgccgggtacagagacaggtatgaagcaaatccaagggctagcatcgcattgatgctatttccgccgactgcattggagatggcgaagaggattccggatgtcgtaaatacgctggttgaccgcgctaaacatgtcgcaatagtaaggggattgaacaagaacctatccgtcgtaagcatgtagatatacatatgatggggaagccagagatttataccatgctgcaacggacactccatcccatcgaacatgttttcggactgctgagtgtagtctcgatttgactgactggcccgacgcagatatagtcatcaatgcgtacgcgttcatgaggtcgacaaggaagtagaaaattgctgttggcaagggccagctcttcgcatccgggagtagggcaaacagaggtaacaggagcggtgcctagatcatcaaattgtcaattcaaggaacggagtcgcagggatctagttccacgaacctggtggaagacgccaccatcataaggcgacacatttcttgtgtacaagaaaaggccttcttgcactacatgcaattagtttacagaatgcggagtcaataatcggagacacgtacggcgtttgaagctattaacaggtgttgagacttcgactctccccgttaacaaatcaggcaatgaaggaaaaagacatgtaagaagcagacgcagcacgaaagctgcgccaaatacagcaatcttccgtcggtctacagccatgacggggtgagggtttggttgttgattccagctggtccccatggagccaacgctctccgccttcgggcacgggccactttgttgcggtaagaaaaaaaagttatcgagaaattttcttcttcttatcagcagcccgtttagatcttttgacaaccacttttcatcatgggcaaagttaagaagaagggtatgttgaaatgaaccggcaatttcaattgaatctactgaccgtccttgcaggtacctctggcgcagccaagaactacattaccagaactcaggccgtgcgcaaacttcagatctctttgccagattttcgccgactatgcatcttcaagggtaattgcctcttctatcggtctttcatctgaatcgcaagactaacatgaattccgatatcaggtatctaccctcgcgagccccgtagtaagaagaaggcctctaagacctctacgcccaacaccaccttctattacaccaaggacatccagtatctgctacatgagccgctgctcaacaagttccgtgaccagaaggcacttgcgaagaagattgctcgctctctcggccgtggagaagtcagcgatgcctcccgcttagagaagaataacgctccgaagctcaccttggaccatgtcattaaagagcgctacccgacctttatcgatgctctccgtgatcttgatgacgctctgtctcttctcttcctctttgctacccttccctccaccgaccatgttccttctaagaccgttgcgctctgtcagcgcctttgccatgagttccagcactacctgatcatgacaaattctctgcgcagatccttcctttctattaagggcatctactaccaggctacgatccagggccaagacattatgtggcttgtgccataccgtttcgttcagcgtgtcaatggcgacgtcgattaccgtatcatggctacttttgtcgagttttacaccaccctgctgggcttcgtcaacttccgcctatactcctcaattggattgagatacccccctaagttcgatacccgcagtgacgagaacggtgccgagttggcggctttcactcttgagggccggacagtcggtcaggtgcccaaggctattgaggctagcaaggctcagagcaacggcaactctaacaaggaagtttccaaggaactccaagccaaggttgacaaggtaattaagaaggccagtttggaccagaacacggatgaggagatggtcgacactaccgacgaggcaaccgatgccatcgaccacttcgagcccgctgctcctgaagctgacaccctcccccaacctgcgatgagcggcaacgaggccggtgcactcttcgccccctttgtgttctacatttcccgtgaagcgcctaaagcccctctcgagttcattctccgctcattcggctgcaagcgtgttggatgggcctccgttctgggtgatggagctttcactaatgacgagaccgaccctcgcatcactcaccaaatcgtcgatcgcccccaacttccccagggatctcttcccgccattcctgctgccgatgagaacgctgtccagaaggtccagcctggaacccgcattcctggccgtacctacgtccagccccagtgggtctgggactgcattaacgagggtaagctcctccgagctgatctctacgcacccggtgccactctcccaccccacttgagcccttgggtcaaggctactcgcggcgcttacgacccgcgcgccacccttgccgatcaggaggaggaggatgaagccgagattgccgccgaggcctctgatagcgatgaggagatggaggacgagcccgcggctgacgctaagcctgctactgctgaagagtccgaggaagagtctgtcgatggaggcatggatgtcgccggcactgacgacgagagcgaggaggagtctgaggaggaagtcgaagacttcggcggctttgaagaggaagccgcatccgagtccgaagacgacgatgaggctgcccgcactcggcaccagaaggagctcgaggccgaagccgctggtctgcctttcaccgccaacgccgccactgatgaagctgccaagaagaagtcttccaagtccaagaaggtcgctgcgaagaagcgtagcgaggacgaggagcttgagagacagaagatgatgatgagtcggaagaagcgcaagctgcttgagaagatgatgtattccaacaagaagactgctgatgagtccgccaagctccgctccaagagacgcaagcttgagaagggcgagaagggcgagaagaaataaagctcggatcatttgtgcatgttagatagtgcttttgccgggcgttgcggtttggatatgtcccatgtataggcacctcaaaaattttgtgaagttttaatgctatttacgggatgacaccccagttatatgtatacctttgcccctgccatattggaacaacacgtttatcgtaaccctaggctgtgacctcggaagtaaatggtctttgaaatttgcgtgtgcttttcccatgttgccatccacgcgaacacgcacaactcgattttggaaatggaattcaggtcgcttgctttaaagattgatagaaaagtcccgtgtcgtagccatgatatagatgcagatgctgttgcacccacacgtgaagaataccatgatgtcgaaggtcgacagtaaaacgggctgcgatcgttgacttttgtgggatttcctagtcatgttttatagcaggttttcgttccttctgctgagaatattttctaggtcaatcaccttagtccgccctgaatctcggtatcaaggatgttcagcatggcatcagttgcgcccaaggtagcggtgcgagattaaaagtggccgaggtggtactggacaatatagtacgagcgaagggcttctcgaatgcgtatggcggccggccttagattcatcgtctgggtacggtatcgtacgtctggattctgggcctagactttgagaatacctttgtgaaggaacgagattgaaaagacggttcgtccgaataatacatttacacccaggctcggagaggacgtatgaaggccctcgggatcacttacaaagggtggaatatccaagacgaagcaaactgacccgcaggatatcttcttattcgtcaaaagtcaccattcggaaactccccgcggttggtgtcaaggttgcggctgatatttcctaatttggaaggaaggtccgattaagctcccgaggtcggatataaggctcggggcctactcttgccgatcaacaaattcaggacgatgaaaatattcatcagattcatagctatcgttttcctcactgtaatcactctcttgtacctctccattcggtcacaaactcaccggccaaccgtcaccgaaatgtctttccggttacatctcgttcggcacgcagaggggatacacaaccccggccacgacacaaccattctcgatcctccattgacagaaaaggggatcgcacaatgcctgaaactctgcgaagactttccgttcaaggagagtgttggcctagtaatgacatctccgctccgacgcactcttcaaacagcacgtctgggcttccaacaaaccatcgatgagaagttttacgcccaaggctccggggcaggagttcaaaatggagcaacccttttgttagagccagatgtgcaagcacactccgctcggccatgtgacactggctcagatatcgcgattttacgttcggagttttacgatctcccatgggaaatcttggatttagatcccacattcccagcaaaggaggggctttatgccagtgatccggagagcttgagtctgcgcggagcacgaattcagcgtcgattggagcagaaatttaaagaactgaaggacagcaaaagacctgacattgccgttgttacacatggcgggtttttgagctccgtcatcggtcaggagaaaacagaagtcggacaagcaaggtggaagacgttcatggtgacattcgatcaggattcgagaattgattcgagaattcttgtggaatcagagtgagaatgtccaagtcgttgattccgttggtgcatgaaatagaccgaacctgtgcttttccgcttagatttctttttctctttgtaactatcatatcggatgagaaataattcaccatgtccaaacagcagaaatgtcgaaataaatttccgaagtccgcatcagccctatctccgagtctaaaccacgatctacaaccccacatttatacccgacaggttccaaggttacctcctgctaagatttcgaagttaccatccgtggagatctgaggatttgatgtccgaaactcgtggtttttgcaagaatcaattactggtagaaaaaaagacaaattcgatgctagtgctcgccgtgtcacgatctttaaaaccctcttcgatgaccttcatggatttatgttggtaacaacagcagtcaggcatgggaaagtgccggagagctcagccgcaacctcagcccgccagcacctggcgctggctctcgtgttcaatgtgagcttttagtgctgagcaatctgtgaaacctttcgtgacgcctactttccaaatgtagtggacaacataggtcggtctattttgtgtgaatatatatattgtggctacagaattgccgatttttggaaactaaagagcaatcaatatcctttcgctgtactacatgcgaaacaggctgggctgggctgatattggcacttcgctgactccggttggtcatgtctcacggttccatcgatatttcatctcaccagtcgttatcaataatacttcgaatgtaatccattgtcgctctgtaatctatgtggcaaactgagaatctgatgctgttacaaattctagggcgtcgaacctagaaaagcactgtccaggaatgccgactaaagcaatctgaattcttcttgtcgaggtgctcatttcctgtagtagtatatctcgatccgattttttaagctgaggcctcctctcatacagacctctgtcccaggccggtatctcggcgaagtgtttaccagttcacgccgaggtccaatatttcttctcgttgagcatagaatgcaaccatataatacatatgtagctgcaagtggcaagtttgaaatatcattctgcctcttttaattattattccatggattcgacgcccctggcatggcaaatggcgtggttagggttactctaggaagtatgcagagtctacccttgttccaggccctattccagacgctcttctgacggtcaaactatcatgaagcaaggcaaggatgttgagtattcgttgaatatacaggcactaaaccaataattgtaaggtaataagttgttgtcctgctgacgggtgccattaaccgaaggattctatcaaaatacccacgatgaatggattatttgcaggtaaacaattccatataacgttcaggtaaacaccctcaaacctatggctaataattatatatatagccacctatatgtaggtcgcaccttccaaggttccatccccgcattccatattagtacagggacaacttttgatttcgagtaacattggaagagccctggaaaaaccatcttcccctgagaccattgtatttctaaaattgtcccgttcgaaatgcgtttgagcattattactgtcgtgggcctcgcaatcgcccctgtgttagctaattgcccttatgcccgagatgcgggtaccgaggttgacaacagtgctaaccttcatgctcacttgcctcgcgatgccattcgaagcaagccaaccacaggtgttgcgtctcctctcccttccgcaacagctgggaaaaaaggtctgctgttgatgaaccgcattgcccccggtacctcagaattatacatcgccaacgcggacggaaccaacgagcgtcctctgttgaaagatcccggttatgaatatcacgctgagttttctcccgacggtgaatggattagcttcactagtgagcgtgacggtgatggaaactccgatatctggagagtgcacccagatggctccgatctacagccgattgtgaaatccccagcagcggaagacagcgttgtcatctcacccgatggaacattagcagcatatgtttcaactgctaacaagtacaacgctaatatttgggttaagaacttggagaccggtgccgagtggaacatcaccgataccccggctaaccgaccagatgaggacatgatgcacgggcactttcgtccagcctggtcaccagacggagattggcttgcattttcctcagatcgcaacacaatatgggatggccacggaaaacctacgtatcttggcctcgctggctgggagcatacccaagaactcggcatttatattattcgccccgatggttcagatctgcgccttgtcgcccaccgtgcttcccactgccttgggtctcccaaatggtcacctgatggcaagcgcctcatattctacgagatgactcgtaatgggacgtgggatgcacatagacctgagctcgtggcagatggtaactccacaattgtgtctattgggatcaatggcattgaccgtcgaaccgaggttggcggtcctggtatcaagacctttccccagtacgtgacgaactccaccattgggtaccatctgaagggcggcgataaggagggcttgtatctcacaaacggtacttacgtcaacaccactattcgctctccctcatggtctactgatggaaagtatgtggtttacgagaaagctgtttggtctatccgccctctcttcaaggagctttacagctgggatagcgaatgggattaccgcttcactgatatattccctcaattatcgtcgaacgaccgcgtggctatgactgaaaagcaacttggcaactcctccattgcaacctttgatctagaggatagacatgcctccttggtatataagcctaatgatacgagtctaatcgacactactctaattggagaaggcctggccggggcctacaatcccagctggtctccagatggcgagtggattgtcttcggagtaggtgcctggtttgaggcgcgtgattggcgaggaggctggattttacgctccaccgcaaacggcagccacaccgaggtcctcaccaccagcaagctctttatcaatcaaaccaagtacctcaacaccggctttcccagcttctcgcacgatggcaagaaggtcgtctaccgcgtgtggggtgccgagaccgccaagtacggcgacgaaacagagattggtttacgcatgatcgacattgagaccagagagattacccagcttaccagcggctgggataaccttccctctttctcgcccgatggtgaatttatagtgtttacccgcaaggtttctccgaccaactacgacgtctgcatcatccgccctgacggtactgatttccgcattctgacttccagcggcgccaacgatgcccacgctgtttggcgccaggatggaaaaattatgtggtcctccggcatgtatggattccagtatgagtgcgctttgtatgaggagactttccagccctacggtcagatcatgatcatggatcccgatggatccaataagcgtgctttgactaattccatttgggaggattccatgccgctctttcttcctaacgattggttctagaatgcggcttgaaaatgtaaagtagggtggcttcgccttgttctctcattgatcatgtccctttccattcgctttggataattaaatagagccgtctgtctatattactatgaaaattttatcattactctcttcaagatgattgtacgtctgtctgttccacgttccattgaacgaaatatagataaaagtcaggagaatggtgtaacttaatcctttgcgagaacctaaccctgagggcgctgaaaaatagatcagcccggacgtatatctgttcgtagaggggctaagttacagaccacatgttgttttttggacgcaaaccgcgctcactactacctacatatgttccagggtagcacaccagcctcttcagagaaattcatccttatctacttatagaacttgaccgaggataaatggccggtcgctaaactgtgataactctcagaaatcagattagaaccatacactactattttgggactagcgtacatattctgtaatatatcgatcacgtgactgtgccgatgatccactcgatttttgacatcttcaaccaggaacaatcgaactgtcggacaggagacccaaaattcaccattcagagtctcggttacagagggttgggacagtggttgttcctttgacctttagtcggatgttgcctaataaaaatccgcatctatgtgacatctaggcactccagatccgaacctttcgcccataagagaccaaagtttcttcccgtcatgtcatctttatatgggagccagtctacttggccagaaaatattccaccacaatctgcacagccgcaccgatcattatttggaggcccaagcagtgatgtcttgcaaccttcttctcagctagaaccgccaagaagttctctttttggaggaggccccatcgaacaagatgcccctctagagcccttttccgaagcagatcttatggatgaggagctagaccaaaacgaaaatgaaattgacgtgataatgcaagggcagcccttggcgttacagaatgactctgatgacgaaagccagggaaataatcgtggcagaagtcgcatacactcaaaaagggcacaggagtctccacttgacccaatctactacgtagttgatcgaggtcttgacctgccacctggagttgagcgtcctaatctatttgacgggcacgccacttcgtggaggaactacaacgccgatgacatcggagcctataatgcaattgttaccaaccgaaccagagatttggcagctcatctttacaatgctcacgtggttcgcaagcgagcgcaggacactgcccgggagaatcccggggtcgacaaagtgccattgcgtgtgaacaaacgatgggctgcatggcctgttcatgcagccacagttccccgtgccaacgagatcattcagagggtaatggatgcctctgataattttcagatgcaacccgatccccgacctagtgccggattggaagaatgcatcacagcgttcatactgaagacctccaaggagaccttccaagcccgagaatgggattcggaagaaattaaacataattctcggaataaaatgaacgacgggaaggaactgatggaagatgaattggggaaaaatgaagagaacgaagaagcgcgtgttgatgtaagaaccctccgaccgacagtcctcctcgacgacgacacagccattcgccaattacgtccgttggtccgcaatgtgatatcgcaagttgaccggctgctatacgggctccattgcgcgatgaagggtcgcaagttcgaggaagaatctggtgaagagcaatggagtgattcggacggagaccatcagacccgacacagccgcaaactcagaagcaggagtcgatcacgtggtcggagaagtgctcgacaggagtctcagaagcgaaacatatcacgtccttccaacagtgcacatatatccactagaccggagacaaaggatgaaaatctgccaaacgtttcccacacccgagcacaatctcgtggtttctctactggccacgagagcagtcatcacatcaatggccgactcaaactgcgagactggagtgaagttatgggactggcatcaatgattggcctcccaagctccgcggtaatgcgtgcgtcaaagcgatgcgccgaccttttcggtgaagatatggaattccgaataatgcccgaaggccgggtaagaaaaagaaaaaaggtagatgctcgagaagaatatgcctacaccgagagcgcgagcgatagtgactcgaagccactaagtgttcagccaattcctcggccagtcggccagccaacccgcaaacgcaaaaccgaccctgggctcggacccaaagccaaagcgaagattccaggccagcgacgatcgaagtcacacatgacccctgcaattgttccttcctcgtccccagccccggaagagccaacagaatctagagaggctattgcagaaaacacaagacgagccatcgctcaggggtcaaggacggttaaaccaggtgttggaaagggccctcatcgaaaattggatattgtctgtcattttaggtcttgcaatcgacatacgaatggattttcgcgaaaatggaacctcaaccaacatttgaaaaaagctcatggtataaatgttgctcctgggaatgaacgttcgattgagcgggatgctacggtcattgtgctcgattaggtattccattttaattagcaagctcgaaatcgcacaatctgtattagcgtccataaattagtgccggcttgatgaagacgctttgaattctgcatttcggactggtgtagaaaaacaattccagctcctgattagtgagctagagagggctagttacaatgctacgtcctgttataaaagacgcagaatgaaggaaaaggtcttgattatggtgccgtcaatgaatgtactcgatgcttttctttccttttttcaatagctaaacctcacggccaagacatgtatggcttcggtcctttgtttgaattcttcttttcttttccctcttgataaccaaatgactgactgaatcaaggaattgtcttgcatacttcagatgtaccatgagtcgagaccttgttgcctatactgataggcttggttttgctgcggaatcggaggccattcgtctttccggtacttttggttgcatctcgattcgctgatagaagcagagacgaccaccgaaaggcaaggtctttgcgctccaagtagcggtccatccgtggaagggcaagtcctaaccagagcattctttcattatcccagaagcttacaccaaacctctggaattctccgcggaagccggcgattttgacaccggactgaggcaccgctgagcaattctgtgcaaagaagcaacctgggaggtggatgtgttggagattatccaagccacgcgagcgttggcagtcgctcagcgaggtaaatttcgggcaacatattgtaaactttgctgctcgcttgcgtgatttgttttcgtgcatccaagacagcacagtctctagctgttctatcggctctgttctcatccaaccgtaacaggcaaaggtcctccagaaatcaatcaacaaattcccctgtagatacatcaacgtgtgcgggaacttcgtacctgggggaggagaattggtatttagtagccttttctcgcagacgattcgccgcagtactgagaagatgtatggtttcaagaaggcttgcatcagtcgctgttcctccaaccaggtgggaggataccctccctccctggtgccgatgtgaaccggaatcccgggaggtcgagtcccgttttttggccacggcgacttccgattctcgaacttctgtatatcggcagacaagcacagagtcatagcatcgtggaagaaggcgtgtgcatccccgcgaatgcgacttgtaaggcttagaagataatgaagaatctttgggggagttgagtgcggaagtcgaatgcagccgaccttgattggctcactgaagccctctcttgctatgttaatgctgtagaccaattcatcgtgaaaactgacgggtaatggattatcatccgaaggaatccctgaagccacggactcttctttccaccaaagatagaccaatgtccggaagaacacacgggtatcttcgtttagaccccgctcatggtcccactgatcgatgattctttcaactagctttggaaagaatccaattttgtgattgagatagtcggaaacagcaggtgaagcttggcacaattgatgcaaagttggtaagtctggcaggtgaaggagaagctcttcgagaccgaaccatggaagacgtccgaatggatccttggtctctgggtttggatcgagagaacaccgaagagagaacgaggaacagagctttgaacccactgaaagcgagggcggacaatcatcgtatctatcgtccctagtggcaggactcctgatgtgctgaatctcatcagggagagtagagttagcgtgctggagatttgaagtcatgatgctcgattccggaggatatggggcaaaagagatgaaagggccgaggccctagcttatacccagcgaatgaatagatgccgagaatctgatgaggtgtgttgtagtatgtattctcaaaggcactaaccttcaagccaagcaacgtaaagatctgttttgggttaaactgggttcaaaccaggattgtggagcttggtccaatggcataaaaggtgctggataaagtggtgaagaagggatatgatgatgaaaaggatgaagtagtgaaatgaagaaggttaatggtaaagatgggtagggtgaagaaggaaaatggtgtattattgtcgattggtctcgcgaggtccaatgattccttccaaggcggtacgagagtgttggtttcatgtttcctattcagatacttatagaagttattgcctaggggaccacagtcagaatctcatctgctacatccaacggctttcttagggcaaggcatcctaaaacggccaagaccaaaacgaaaggcttggctaagatggaaggaaaatcagtagagtcctgttagcatgcaattacctacttatacatagtagatgaggccaaatgtgtgtcagatagtttcatatcgcgagtgagtagtccttggatctcgccagaccgtaacctattggcatcctagggtatccatactgctcctatcagagctatagtgctttgacagtaagtttattcagaagggtacttatattagaggatagtatgtacttactatgacccttctcccttcgagggtaagtcgtggatgagctcggggtattacacatacactatctcaaggccggaggttcattttctattttgattggctacaaaccccgtattttatcacagctcaaattctcattggctcatattaccgagtcctgtaataccgatttccaaattaccgaaattaccagatctatgaaatgaaccattctctacagaaagaggtttctctatttcattcaatttttccttaatcgaacttgaaaaaagacaatacaaaatgcaacagaacatcaagcaaaacaaaagaaacaataacaacagccacaacaatcacagccgttgatctatgccgttatgtgcagaatgacatcaactccgcagatctccgcttgaagctatggagcttcgaagattaccagaatcgcattctttagcacattaccattacacatattcggtgcttctcggacgcagagagcaatcaccattgagctaacccccactagaattgctgaattgctgaattgctgaattgctccctttaaaggcatctccaactctcctactcccccgcaattttctccatcttcccgtgtgatttctctcttcaaggcccaacctcaccttgatttataatggaccgcatcatccgccctgtcgctcgccaattattgagaccccgaccgagatatcctttttcaattcctccgacagctcacgcacagagattatacagcatgaaacacggcgcgccgcaggtaagatctgtagtcgaatgtgatttccatagttcgtactgatcgattacagttgaaagaccagtcgcttttcattcagaaggcgtacattaatggcgagtgggtcgatgcgaagtccggcaagactttcgatgtctacggtaggtaccaaattgaatattcgggttcaaggtggtcgctgacttttcgtcctattcagacccagcgactggaaaattgatcggaacttgccccgagctcgatacctccgatgttgagaaggcgattcaggccgcttccgaggccttccccaaattccgcacaacgctaggccgcgagcgcgcgcgcatgctgcgccgctggtacgatttgttggtcgcgaatgcggatgatcttgctaagctgattacatgggagaacggaaagcccctggcggacgcgaagggcgaggtcaactacgccgccagcttcttcgagtggttcagtgaggaggcaccccgcacatacggcgacacaatccccgcttccatccccggaaaccgggtcatgactgttaagcagcctgttggtgtgtgtggtttgattacgccatggaacttccccgcggcgatgattacccggaagattggccctgccctagcggcgggctgcacggtcgtggccaagtctccccaggagacgcccttcacagcgaacgcgatcgctgagcttgcgcaccgggctggcatccccaagggtgttgtcaactttgttacctcctcgaagaacaccccggcggtgggtgagctccttaccacccaccccgaggtgcgtaaagtgtcattcaccggctctaccaacgttggccgcatcctcgggaagcaggctgcgtctacaattaagaaggtctcctgggagctcggcggtaatgcgccattcatcgttttcgacgacgtcgatgacctcgacgctgccgtgaccggcgccatcaactccaagttccgcagctctggtcagacctgcgtgtgcgctaaccggatctatatccaagaaggtgtttatgaggagtttaccaagcgctttgtcgagaaggttaaggacttcaagctcggtggtggtttcgatgccggtatcacccacggacctgtcattcacgagcgcgccgccaacaaggcccatgaacatgtgctggatgctgtttccaaaggcgccaaggttgttattggtggtcagagggctaccgcgctcggacctaacttctaccaccccactgttctgaccggcatgaccaaggatatgcttctcgcttgcgaggagactttcggccccgtggctggtcttttccccttcaagaccgagaaggaggttgttgagctggctaaccatgccgaggtcggtcttgctggttacttcttcagtggtaatgttcgccgcatcttccgcgttgccgaagccctagaggttggcatggttggtgtcaacactggtttgattagtgacgttgcctctccgtaagttaaaatctcccacattgctatatcaggctctaacctttctacagattcggtggtgtcaagcagagtggcttcggccgtgagggcagcaagtatggtattgatgagttcatgactatcaagactataacttttggtggcatgagtctgcctctgcaggagtaaaaattggatacgaatgatttatttgcaaactatatattatgccttaagatgaataaaatctaccatggattcatatgaacattttgctcttctacacaatcatacttgctttacaaatattatatcctgcatatatacttcaaagattgcggtcgtgccattgagtcttccgtcatatagtgatcacctgaccgtgaacacaatgcggcagaaatatccactgcctcgccgccttctgtatcccttcccctacaacaagctaataattggcatctctatcatcagaaagaaaaagctttgacgggagcagttttttttttttttttctaaatgaggtcatggtttgatctactccaatgcgttcctcacttcgtttcctcgcggcggtctcacacacccggccctccaagctgaagaaaccttctatcagtctagaccatgtaagtaactcaagcttgggttgaagtatatgtactaattgaatcatacagtttatccagagacagcgggtgttgtcattctggcgggaaatcatgcgagcattaataagtgtgcccaccgttccagtttctagaagccatgtatgacactaacagacatgctcagaggtgccaccttcgtcaacacggactgagctacacagatatgcacgtgatgaattcgaacgccatcgaaatgtatcggatctggtaagttgatttcggatgttttctatggcaaggttcagatctgagaatacttgactgacctttcttcagcaacacataagatacttgctttcggtatgaaattttggtgttatactataatattatagattgctaatgagattaaagacaggcaaatcagagttcgagacgatgaggcggtatattgacgaacagatcgctggttgacctgtgttaggaatgtgtatattatggtgtcaaatcaactcaaggcatgtattgccgagctaccgagctaagagtgcataccgttgaagaacggttgatattagagggtcgacctctatagttgacaaggcagttctcggtcgaaaggagcttccctgttgcgttccaatagaacgggtgggatgtggtgggatgtggtggggagaacttccgagggtctctccacatcaagacattcacgtcgatataggagtctctaaacattgacggagattgtacggagccgggtctgatgaaggttacgtcttcaattctcgaatatagacattgtattctgctacattgtcctctccaaacaccccgagtgtatttcaacctcatgtggctgaggcctagactattggatggcaggcacaaccggaaacggctgccaggttacagctgtctagaagcttgctttcatattttcaatcctgcccagatccttaacatacagagtgtagtacgtcattgattttggtccaggctcttttatatatttgggagtccaaggttgcggcgtgttcatcgaatttctactacattgtgtagattcttgaaattacacccctcaattataatttacattctaaaggtattcactattaattcaagtcctttatcacctccaatacctccctaggagaccaaaaccatgaaatccgtctcatccgcctcatcctcccaatccgtcagccctcggcgggcaaagcacctggaacgaaaccgcgtcgccgccaacaaatgccgcgaaagaaagaagagggaacataagcaaatcgagcgtcggctcacccacgaaaccgaaaagaaagacatcctcatagcacagttgaattgcctacgagaagaactgtgggatttgaaaaacctcgttttccagcacgccgagtgccaagaccacgaaatcaaccaccagctcgccaggatgacccagaccgtcctgcaaacccattccaacccggatgtcggtccttccttgcccaccggctcatcgccgacattctcgactgggacgtggtccgatgagtcggtcgcagataacgccaaccctaccggaccgggcgcgtacaataacgattggacaatgttgcctgcaatcccgaccgaatttgcgccgtacgagccgaatggctttactgattccatgtttgagaactttatcgatacggacaatgggtttacttgaagaaataagcttccgttggttggctgttctctcttttctgcttagcgatggctgtatattaatctcagggctgcaaccccagaaaagcccgtaccaaaactcatattgggaacttttcatagttacgaaacaacgaatctacgaatcagtctatgacatggagacctatttccgcataaacattcctaaaaataggcctcatgttcctgcacaagcctaagccctggaattcccgaaactggtcgggtcacacggggtagatacgaagatccaccgtgcaatgcaatgcaaagcgaatgatcgcgaatcatcgcgaatgatcatgattcttctgtttcttgtctgcatgtgctggattatgtggggagatccacaaagcctctgatgtcactacccgagcacttgtgacggcatcgaacggttagtatacattggatttctatttattctgaagattcctttcgattcatataattcatactattcatatcatactttgttacatgtttctctcgctgatccctgtattatagccattatttacttctatattctcctcaatgatgcctacaggcttacctacgccaccttacggggagcgaatggcaaccttttcccagaaatcagtaatgggtacactatttgagacaactgaacggttagaaaaaaccaaagccgctgatatttgggcgagatcttgtatgctaagactatacgaaccagctacacagaatggaaacctcttggacttggggtatctgggcttgtctggtattatttcctggagcagttctatcaccagccagaactaacatttaattacatagctctgcaagagatcagcttgctcatcggactgtcgctgtgaagaaactctcggaacctttcaagacaccggctattgcaagacacatgtttcgagaaatgaaactactgcgacagttgcgacatgaaaacgtgagaattgccttgcgcagtatggaacggctgtctaattgcccgctagatcatcaacctgaccgatatctttatttctccctcagaagacatgtatgaagagacctctctccttacatgggaaagtactaattactctagatacattgtgaccgaactcatggcaacagaccttgatacaatattgaaggcgaaaagagtcgaagatcagtttgcccaatacttcatgtatcaaataatggttagtatcatctaccaacccccgcccagaacgcacgtgttcctaacaacaattccagcgtggcctgaaatatctccattcagccggtgtcatccacagagatctaaaaccaagcaacattctggtaaacgagaactgtgacctgaaaatatgtgacttcggcctggcccggatccaagagtcacacatgaccggctatgtctcgacgaggtactaccgtgctcccgagataatgctcacatggcgaaagtataacgaaaaagtcgacatctggagtgccgggtgcatcttcgcggaattacttctgggggagcctttgttccctggaaagaaccatatcaaccagttctgtgttatcaccgatctccttgggagcccccctgaagaagtcatcaacaatatcacaagtgaaaatgtgagcgaggtcatactctgaaattatattatacccaccgaaaggggttttctgattacttttccattttctgcagacgttgaactttatcaactcactcccaaagcgagcccgcactccaatatcacagctcattcccaaggcgaatgtaaatggtatgtttcaagctatcgctttccttgaaagcctcaattatacatctgaaccagaaagaaagaaagaaagcaaaaaatactaaccaaatcagcggcggaattaatcgatcaaatgcttcaattggaccctcaagtacgaatctccgcagcagaagccctctcatccccatatctcgcaccataccacgaccccaatgacgaaccagtcgctgcggaaacattcgactgggccttcctcgaagcagaactcccagccgatatctggaagaccatcatgtcagtagtcaatcctaaatgcagtacatgccaacatctctccggacattctgctgattatttctagctacggcgaggtgctgggattccatgcagaaatgaaccagactggccagagtgggccaatgaaatcgataaaccaggtggacgggatggatatcggttaaaatttaacgctagagtagattcatgatgaagatttccatttttgggtatgattgcttttaacggtgttgtaaactgagctgcaccgcccggataaggagagaaatggagtaaggacagattatcgtattaatattgggttgatacatgaccagaccatttctggtatatcaagatcatataaacaggggcagacatatgttcgtcaaatcaactaagtggggtatcgctttcatataggaaacccaaccgcgtgcgtatcatagcttgcaagatgtgcaagtgccgttagtacctaaacatatcctcaggggatacctagacagccccatcggcagtggcggtagtggtagtattgccgttggtattcgcatcagcagcactcatctccggggaagcatcatcacggtgattcttcgcgttgcggcgagagttcttaaggtctatgatggcgaaggtatttgtgacaacgaaagtagccctgctcagaaccacaggttagataatgtatgcatgcgtcaatccttaggcatctgttttaccattgcacggccccgacgacaatcaaagcctggagggcgtggcagctggaatagtggcatgcgccaggcgagggaatcattgcagccaaggcgatccagccgctgagccagaggccgccggtgagcagctctatgagaggaattgcgatttcatgcgagaagcgagggaagcgtaggggtgcgaggcccaggtatgggactgcgatggctgttgtccagcagccgttgaagagcatgtagtagactacattcgagtaggaccatttgtcgtacagagaggcaatttctagatggagtcagtgctgtcatggagtactttgtggatagtcaaacataccatatgcggtaagaccaatcgtggctagggacaggatggcctgcacgattcgcaatgggttgatccaggaaagcattttgaatgtggaaatggttctttttgttgagtatagcgtacaggtgggtagtcgatttgacaggggtatggaggaaaggattaggaaacgagaagatctacagtcgtaagggaatatcatgggcttttatactcgtgagagacggcctataaggcgactagcttgtgttccacacgtcatggtactgtgattcggaaaagaatgtgccttgggaaagtcttgaaagagttaggctgcatgaggggtggagtctcggggtaactgaaaagtttgacccagggtcattctgatagaccctggagctttccaaattagggtttggtgttggctcaacttccccgcattctaggtttctatcatgcgcaccatattagtcttcaggatggaaagcgttcatcttagactctttcatactctaagaattcaatactatttcaaaaccactcccttgacggcactcccgttccgaataagcactgattatgttaggttgccgcacgctagctttgtcgatctcacatgaaagcctcggccaaggaaacaaactcggccatgctgatccaaaatcaacgtgctgtttcgtaaattccagatgctgccaaaaaggtggtttaccatctgctagtggcgtgattgtttgggatcaattgagatatttcaacctcggtacgtcgatcatcatccccgtacacagtacgaccccagacgagccaatcgtacttctgtcactcatgcttatggattctagaacggcataattcatcagttgagaatccacatactatcggagaatttggatgcatatgtacaaaaataaaaaagaacctctcctatcttacaaagcgcacgccatcagttccgcgagataagagccctgacggcatccataaccccaatagacttctcatccgcaggctcgatcgatgaccgtgccgcttcagactcagaacgaggcgccggtttattcccggcctccttggccgcagcgtcaatagcagcgtgacgctccctccactcgcgatcctccttatcacgaatctctagctcgcgcaaccacgcatcacgcttttcttgcttcttccgaagttccactgcttggtcgaattcccggcgctgttgccgctccgtcttgaagtacattccgccggcgactagggcgactagtgtgaaggcttgtgcgtagatacgggctcggaacattcggttcatttcaaccgagtcaccgattttcatcgaccggtaggcgcggtagagggcataacatgttgcggcgcatcctgtggcagtatgtattagttttggttttcaatgttgggagggaaattccaaagtcaagatgagggcttgtgcagatggatttcgtaccaagtggaaccaggggttcttccttgagacgtcgtttgaatttttgaacgccggtctcttctgtaaattgactgtccgagaccgagtgttagcagacgagccttcccttcgcttcctctgcggcattgtcgggttccgcttgcggagcacgcggctaatgtgtgatacatacgggttctcctcgtcaaaagacgaaggaacaggttcccggttcatcgtgaagttgatcgtggtcgggtatgttgacggtcgtgcggagttcaattgcgtccacgggatgcggagttttcgtcacggggatattcagccgagttttataatgggtagttatgtagcaaagattagatcatcaagtcggggggcatgagggttgggaagtgtcgatgttggaataggctcaagatgctggagcgcaaagggtcgagctgtggtatgacgccaagttttcaaacatattgggttatgtaactatctggcccagccctggagccctggaggccatgtatttacaatgctacaacgacatcagggttcctgctttacatgtttctgtttgtaaatctcttatgtcggattggtctaaaataaaataacccaagcataagccattcctatactagtagcccctcattgttgaccgctatctacatctgcttgtcgtgcctgctacccaacgttgtctcctttcattcagtccaaggaacacactgtttcatatttgtctgaaagatttccattcgttttgatctcatctcctcttatatcaccctttcgacactcctaaatcaagctttatttcactaactagggctagttagcactcggggttgatgacataagggactccgatcaccggtcccgccttaagaaaaaagagtcaaagttcagaatttcccggctctcaaattctttctgatcagcattgggattgattgtcttcatcgtttggcagaaacgtttggcagaaatcagcctgaacttatcatgtccgacgaggctcccaacggcgccacgacgcccgtcactcccaagacgagcgggcttgcgctgactgagtataccgccgctccgacgccgccctctgaacgtgagcaaaggaccccaggattgcctcctaattggggaattcccgaagcttttctgcttcccaacggctacccagatgtaattcaagttctgcaataccccactgaatcttcaaattctaacactgccccgccattctagtatctccggttgattttgacgtcacgagtttacgatgttattgaagaaagccctcttacccatgctgtcaacctgagtagccggttggaaagccgggtgcttctcaagcgcgaggatctgcttccggtgttcagcttcaagctccgtggcgcatacaacaagatggctcatttgagtgatgagcagcgctggaagggcgttgttgcttgctctgctggtgagtttataactggtagataatgcaaaatggaaacgccttctgactcactcgacataggaaatcatgctcaaggtgtggccttttctgcccgcaagctgagaatccccgctaccatcgtcatgccctccggcacccctgccattaaacacctgaatgttgctcgcttgggaggaagtgtggttcttcacggaatggacttcgatgctgccaaagatgaggctcaccgattagagaagctgcatggtctaacgaacattccaccgttcgacgacccttatgtcattgctggccaaggtaccatcggcatggagcttctgcgccaagcaaacttggacaagctcgaggcagtcttctgtgctgttggaggaggtggtcttattgccggcatcggagtttacctcaagcgcatcgcaccccaggtgaaggtcatcggtgtcgaggcttacgatgccaacgctatggcccagtccctcgatgcgggtaaacgagtcttcctcaaggaggttgggctctttgcagatggtgcagcagtgaagtctgttggcgaggaaacttggcgtctcagccgggaggtcatcgacgaagtcatccaggtgtccaccgacgagacctgcgcggctatcaaggacgccttcgaggacacccggtccatcgttgagcctgccggtgctctcgctcttgccggtctcaagaagtatattgccaagaaccctagccctgaccccaaccgcgagcttattgccattacctccggtgctaatatggacttcgaccgtctgcggtttgttgctgagcgcgcagctctcggtgagaagaaggaggctcttcttagcgtgaagatccccgagaagcccggcgcgttcgccaagctcgttgaaactgtcctgccccacgccgttaccgcgttcaactaccggtacgcccgcgcagattcggctgatgtgctgatgggtatctcgctatctgcctctactggccgcgaagacttggccaagatcatgggagagctggaaaaggccggcatgagctgccgggatttgagtgatgacgaacttgccaagcgccatgtgcgcttcctcgttggcggccgctgcgaggctgccgatgagcgcatcttcatgttcgagtttcccgagcgtccaggtgctctcgccaagttcctcaccacccttcgtccggaacagaatatctctctgttccactatcgaaactacggcggtgatgtcggcaaggttctagctggaatccagtgcccgtcgcccgagaaggaggacttggaggccttccttcgggatttgggctatccgttcagtgagcacactgactcgcccacttacaagaccttcttgcgttccgaataaacattttgttctaaaattgcaaaagaagggaaggtgggtaacgagaaatgtattgttcatagcttgttatggtttcagcggtttaaggtccaggcctgttttgtctcttgtttggcgtttggttgattttgatagaccctttgtattataggtcacatagtctacttttagggttctcactacatactagcataagtacaaataccctcaaatcttctttttcttattatcgagcattaaaacagacttttctatcgagacactcaataaatccacatttcgcattgtcattctgttttacttgtagtataaaacggaccaatcacagcggccactcgcatcggctgaccggcgatacagaagctccggccaacatttgcgatcgcagcacaactaaagaaccttggaagccaaacatcaacctcgcaccgcaccccgatacctcttttgttcttcataaggaacatttgaggcgcagcctccacttgatcgtcttttgggaagataaaacagaatcaaaacccgccgccatgttttccctccgcgccgttttcggtgcctcctccggggccctccgccagttcttcccctctgtgaccacccggaccgcctcattacggcctttctcacacatgattcgcaacagcctgacaagactccgtggacaagcaaagtccggcaatgctgttgctgtggcgaatgggtctgctaaacaggtggagcaggttcgaggaatgaagactcggtcttctgttaagagactatgcgatggctgcaaggtatgatctaggatattgaacagcttcaatgctggaatgattgcgaagtcatgttgtctggtgctgactttgaatagcccgttcaccgcaaaggccgtgtctacattatctggtgagtggaccctgtgacattgaagcccggagttgttcggttttaatatgtttttttcttggtcttttagctcgaagaaccctaagcacaagcaacggcaggggaaatagagtcgtcactttccatcattttctccgatagcttgcatcgctttatccttccgcggcagcctttactcgaacagtctgagatattggcgatacttctaggcataaaaacatgctctcaataaccaggttgtcttcagctgccttggatacacgacttgccgtggcggaactcgtacggcggcatatttttgcattcttgttacaaaaccagacagtggtaccacggcgcttgtgtattttccttgtatattagtgtgacaatcaagtttatttggtcttcatgtttcgatccaattcatcctaatctccagtctttctcagatgcccaatatctatggatatatgcgcaccttactccaaccaacggcttgtcgccctactcaaacctccacgaccaagatatggccgttttcaatatcgatatctcattttatggctagctatacaccgaattgtaatctaccggctctgatgggccgatgtaaatagtcacgtgatgcgttcctggcttccccgaacttttttttcggagccaactaaacatccaattcgcgttgatcatctcaattttggagtggttggatcatcaccatgcggtctccttatcttgcacggttacaaacccgtgcggtgtttggtctaaccagatcagctcgtttccaaccccagactcttctgcgccagcgatgcgcttcaacgcccgcgttccggtccgccgctgttgcgccggcttatcagtcgaagctgggacaatgggaccagcgccgaaattcctctgctgttgcttctgcggtgtaagtatgcttgtcgacccgatctgtttcttttgctctttttaatgttgttattagtctcgaggctgctaaggccgacccggagggtctgtcccaagccgccattatcgacaatctcgatccgctggagtccgctcgtcttagcaagtgtcgtaacattggtattgcggtatatactatcccacttgctccatgtacgctttttgttcttgtctaatgaagtctcgctgcctaggcccatatcgacagcggtaaaaccacctgcacagagcgagttcttttctacactggtcgtatcaaggctatccacgaggtccgcgggcgtgacagcgtcggtgccaagatggactccatggacttggaacgtgagaagggtattaccatccagtccgcggccaccttctgtgactgggttaagaaggataaggagggtgttgaccagaagtatcacctcaacttgattgatactcccggtcacattgatttcaccatcgaggtcgagagagcgctgcgcgttctggacggcgctgtcatgattctgtgtgctgtctcgggtgtccaatcccaaacgattaccgtcgatcgccaaatgcgtcgttacaacgttcctcgtatctcatttgtgaacaagatggaccgtatgggtgctaatcccttcaaggccgttgaccagatcaacactaagctgaagatccctgctgctgctgttcaggtccccatcggtgccgaggacgagttcgagggtgtcgttgatttgatccgcatgaaggctctatacaatgttggcgagagcggagaggagatactggagaaggatgaaattcctgagaaggtcaaagcccttgccgaggagcgccgtaccatgctcatcgagactcttgccgatgtcgacgatgagattgcagagatgttcttggaagaaatcacacccagcgaggatcagatccgagctgctatccgccgagctactattggcttgaagttcacccctgtcttcatgggatctgcgctggccaacaagtcagttcagcccatgctcgacggtgttattgatttcctccccaaccctgctgaggtggagaatctcgctcttgaccagaagcgtgacgaggcgtctgtgaagcttgtcccttataactctcttccctttgttggtctagccttcaaattggaagagagcaacttcggtcaattgacctacatccgcgtctaccagggtactctccgcaagggctccaatgtcttcaacgctcgcaacaacaagaaggtcaaggttcctcgtattgtccgcatgcactccaacgacatggaggaagtcagcgagattggcgctggtgagatctgtgccgtcttcggtattgagtgtgcatctggcgacaccttcactgatggaactctcggctacagcatgacatccatgttcgttcccgagcccgtcatctcgctctcaatcaagcccaagcagagcaaggacggtgccaacttctccaaagccatggcccgcttccagagagaggacccaaccttccgagtttcctatgataacgagagcgaccagaccattatttccggaatgggtgaactccaccttgacatctacgttgagcgtatgcgccgtgagtaccgggtcgattgcgaaactggccagccccaggtcgcctaccgtgagaccatcggcaaccgtgttgagttcgatcacctgctcaagaagcagtccggtggacctggtgaattcgcccgtgttatgggatggatggagcctaccggcgtcctcgaggacaacaagttcgagcagcaggttattggaggcagcatttcggagaagttcctgtacgcttgcgagaagggtttcaacctctcttgtgagaagggtcctctgattggccacaaggttctcggaactcgcatggtcatcaatgacggtgccactcacatgacagattcctccgaaatgtctttcaagaatgccacccagcaggcattccgcaaagctttcgcagaaagccagccttctgtcttggagcctctcatgaagacggtcgtaaccgctccgactgagttccaaggtgatgtcatcggcctgttgaacaagcgcggtgccactatcaacgacaccgaaaccggtgttgacgagttcactgtctacgctgactgcagtctgaacggcatgttcggcttcagtagtaacctgcgcgccgctactcagggcaagggtgaatacaccatggagttcagccactacgagaaggctcctcctcacatgcagtatgtttcaaccccaatcacttctctaaatatattatccgttgctaactgtcttctcttacaggaaggaactcattgctaagtacctgaaggcccaggccgacagacacaagaagtaaacgataaaatatgtaataactcctcacccactccaactactctggcaagccaagctatgcaatgcctagcattggctcttgttggagccaagaagcagcatattttgctttcaatccctgctgcttcttccatccaaaaccccctgtactatttacgcatggcactatatcacattgtgactttctgggacctgtatttcaagatcatgatactactttctactctcctatccgaacaaatagaatttgtgttattttatctctccctcttcggattatttacttataactaggtacttgtgtctttgaacaaggacacccaacgaagtatggaactcttgtccttggttgtttgttgccgaactcaaaagcccctggcctgaggacctcgtactgcttatcatcaatagtagctggggtaatttgcttcagatgctgagccgactcaaagaggtgatggatcttaggcccataagaaaagacccatcacgtgacacatagggatctttccctctcgacacaatccaatcccatcttctgaatcgtgtatcccactctcgtacgcgtcttacggttctattctcaagcttcccaagcacaatcagaatacaggtcctgaattgccgaatcggatcaggccgaccgtggggtctggttttaccgtgctctcggcaattgtgggtcctagactcataccccacggcatgtcagcgaaacgccccagactcgcgtccccggtacggtataatcgcctgccgatcccagaaaccgacatcgatacctcctttccccgttatcagacactatctcccaggcttgtactaagtaagatgaatctcgctttcctatcatgctgtatttagacttgagttgctaacgcgcaacaggaacggattcgcaagtatggggactccccgagtcagcagaaatacgcgctattcacactcttgagactacgccagagaatgaacagctggttcggactcatcatccggcattgcgactacgtgatctagtttacgtatcgcatccccagtacggccctgaggtctggcttgtgaacggcgcgtgcgaagacattgaagcgggggggcgaccgttgcacccttatcctgaggatagacggaacctttacccgtctggaattttgactccacgttcaccatggaaggaggattacctttttaaggaaggtatcaacccaagaaagtttctgtcccctgagaagattgatggcttgcgcgagcttttccccacggcagtaggggcccgtgttttcgtcagtggattcctggtagtccttttcaaatcactccacgacattcaagccatatatgaggaaaactggattatggaagctggtggtttgcgaatactctatgatgaatataggcttgaagctaccgccgataccgttacatccggcatggaagtttgcgacaaacctgagagtctccagggtcaaggctgcttaggcctgagaattcggatgaacgatggaaaagaagctatcacaactgtaacgcatggctttgtgaggaaccctcgacgctcccgtatgacgaagatgttttccgagtggatcctaagagccaagagggctcttctatgcctccggaatccaccacctcaatctgatacttctgctattggagtcgtacggaactccaataaaaattctccgattgggaaagaggtttggttagcaacggagaaaaagagggtaagtctcctccctttttcccgtgcttactgctaataactccaacttattcatatagatcggtaccatctcctacacattcgacgatccaagcccagttcttccgtttccctctggctatcggcacgaccttagcctcattatggacgatgagttacctcagcttatcagcccgcctggttatcccgctgtgtcggaatgggcgtcatactctactgtactcgttgggtccgatgtctacgttgtccgaatgaatacagtcgttgggaggtgggctcttctcgaaggaaccgttggcccgaatgcaattagaaacgcaacggttataggtacccagtacctatgggaccgcactgcgcattcacagactgcatcgcttctatggaaaacgaaggaaccgtttagccctgccgatggatggtcgggatccgttctctgtcttggacggccgacggatgagttgagccaagccgttgtatttcagaatttcgaagtgctctgtaccacgttcgtcgaactcgaacccggtagaactcaagacgtacttgttaaagggggattcttactccctgaatcgatacggtcttctcaaattgtcatcggcaatgacgagcaccggggcaggaattccgatatatatccgcgccgcaggacagaacgcgcagttctagaccgtcgggtattttcggctctctagcaagatttgttctggctttggttcacttgacaattctccggaaattcttactctttactatgttatttttagactgcctcagtgatcacacatttcttacctttgtgaggctttgctctggctttggttcgcttgacgattcccaagaaattcttactctttactgtcatttttagacagtctcagtgataatacatttattacccattgtgaggccttcaaataaactagaatcctagaggagacgttagacggtcaacatacagaatgaaaaaggaagttataggatgttgttggattaggagataaggaagtctattgcagtctgtatgatctccatgcttgctagctgacctccctagatggttggggttattatatcgctctcgtcttctacagcacgaaggaaagtcccacaaacgaattcacccatgaatgatatagaaacttgaatttcttagggtcgggaaattggacattatgattttcgtatgttaggtaccatttctattagtataccatacaaaaggcacctgatttgcgatttattgttgactggggctcactaacacacggtatgtgttttgggcgcctggcacgattattctcttccgctaacgactctatagtatgccttgctacgctcagcaaaatagactcggaactcgtcgactcaaacgtctctagttattcaagcaccacgctctcgggccttgcgcaagtcttcgactccggctttcttctttagttgaggaggggacgggggaatattatagtgccaaggacttcgaataaaaacatgaacagtgtctgagggacgaggagggtgctggttgtcgtcgacgttaacggggggcttcgggcgagctctgctggacgaaagtagacccgtcgtatcctttgtctgttcaatgttagcatgttggcttggtacatagtctgcccatctcactttaatcttcttttctgccttgaaagtcgacacacgtacaaatgagggatttgggcttgaggggcatgaaaggggcgggagggggnnnnnnnnnnnnnnnnnnnnnnnnnnnnnnnnnnnnnnnnnnnnnnnnnnnnnnnnnnnnnnnnnnnnnnnnnnnnnnnnnnnnnnnnnnnnnnnnnnnnnnnnnnnnnnnnnnnnnnnnnnnnnnnnnnnnnnnnnnnnnnnnnnnnnnnnnnnnnnnnnnnnnnnnnnnnnnnnnnnnnnnnnnnnnnnnnnnnnnnnnnnnnnnnnnnnngggagggggagggggaggggggatttatgagcggaaagagccttgtccgtgggtaggattgagagaggcttcttcatggaaacgggaggtaagggcttatcctgtgatgtgtcagtctgcttcgatatatgttcaatctgatcggacccaggctcagataggggaatgtcctcggagtaatcattcttgtggaaattgaagctccgaaacgcctggatgatgggaatatcttccttactcacaccggtgaacaagggaggcaaatattcctctgcatgctggtcgtcgtctcctaacttgtccatgaggtcttcaacctcggggtcgctaagcgcacctatgaagaagggccatctcggatcagcaggcggtgatgtagggatacgaggaagtcccttcgtggcagcaggtcttcctgcagcaccatttccctgaccaactgatggtttcgggtgagcgtcttcggcatagatggtcacattatcccagagcggatcgccttcttcatctcggatttgatagaatgccaacaaacgacgagcaatgtgcagctgggtttccccatctctcaccatcatggtcagtcgataatccagatgaaagtcttgttcgtacaagacagtcacgaggaatgcaccgatcgcgtcacctgggaccttgtccagaatccaggtcctcaagcattttctcaagtaatggattgccttaaggtcccaggaaatgagaaggcgtcgttcttgaacagcaaggacagtatcggccggtctgtcctccaagaatgtctggaagagggcttctagttgccaccggctgctgctagcttccttgtaggagcggcttagactggggttggctggactagatgattcagtggggatcttgttacctgttggagacatttgtggtgtataggatgagtgatatattgtgaggtttgtttctgctgaaaataaatgtcatacagtcaaaatatatgagaaaagtatgaacccaacggacatctccaagtatttatgccttttgggtcctttttatttagtgaaggttcccattgttaagcacagacaagagaaagagaaaacaaagaggtatgcttgtacatcttcaagtgttttgatcaaagaagatattgttctggagtatccagcaagagtaacaaagtcgaacaaagacaagcaaagagctttggtctagaaagttactcattgtcaaccctggttgcttgcagagggattctcatattacgcccatgtcaccttctgggggctgaaagacagccagtggacaaggctcaccatcaaaagaggcgaatgagtattgttcaaattcagatgtattggaacagagatagcacaactgaattatgtacagaaggtgaagacaaaatatcatgggaatcatttgaaacagacgcaacgctccattaaatcatatatgatggattagaaaagaagacagcagccataaacgagctcactggaagggtatatgcacgccaataggggcgatagagttaaaaacagtaatgtaaaaagaaaagtccccaaacgggtagtgggcacggaatcagaacgaagaaggaatatgcagcctgcgatcaaagccacaagacccatcgaataccagtaaagacgccccggaagacaccacgtacaaacttgaaacccatgacaatcagccacacccaccaaagcacagcaacaagagcccattccaaaaccatgaatccagtgcggcggatccaccgcaaccgacggcgacgcttacgaaggcctttatcaagggcatcactcagttgcttgacagcgagtgtgctggtggtgttgagctgaacacataggtcttcggcatcatttgccgtggttcggacgcgaggagtcagggaattgttgactaggtcttccaggttcttcagctggtaccgcaggggatacgaggtggaggtggagaaatgatgcatggactgttggaacgagtgctgggtgtgctcgaaacgctggaggagacattgagcagcgaggtcgaactcgccaattcgcgtcactcgtggaacagatgtgccgggacccaccgagctttgaagccagtgaggaactggctcacggaaggtatgggctcggcgagtgatctcccgggctttgatccccgatgacaatagaagagcccgcgtgcgctcgacttctggtttaccaggtacaccggtgtcaatcaaggtacggatactgcgcccagatatactccaggcgcgactagcacctgaaagtccggggcgtcttccttccggagaaagccctggtgatgctcgagcgttggcaagcccagtgacaggtggccgtgctaagctgaaaggaatggaagagtctttgatctcgtggcgctttgtccgtcccgtgtgtagagaagggctgaaatcaagcgttttgctacgtggcagcgcgaacttcttgggagaatcacgggaaccataattttgtggagaaggaactcgctcgttaggactgccaaaatcggtcgtatctgctgtttcactccgttcatcttgccgcagcggtgatgtgaaggtcggtagggagggtataaagcttcgggatgaattcttctcagaatttccacgggtcaatcgcccaggctcatctgtaaatgttggcaggcgccgtaagagacctttggagccatacttcctgtcactcctagactcttcatcagaaccgctatcatctgatggaaatgtggtggcggatgatgatttccgagattcaggatcttctttcttcaagatgagatctccgaccttggagacttcattgcccacgatctttgttatccgacctggtcccttaaatattcctcgcagctttgattcggggagatggggccctttacgggaccgatggccatctccccgattgccttcctgcgtgccttgatcgtcatgataggatgatgacacaacgtcaggaagaggactcggctcgagcttagaggcaccctccgtcagtgccgtcagatttcgctgacgcaaagtctcgggttccggcaattcatcttcccgctctcgctctcgatctgcttgtttgctcttgctacgctcgtggcgtgaagcaatcttgtggcggagacccttctttgcgggcgagggagatcgacttgaggggggtgacagattgactgctatgctcgggaagtagccaatgcgagcgggagagttgggcgcagtactatccatgccctctagggacacacgaagatcgtgccggtcatcaagactacccgccgatgagaaagagtctttcatgcgcttgcgggcttgcttcttgttgaccgacaatggctcagttggctgtggtgtccttccccgatcaatgtcagcgttacgaacatcggggaatttggcgcgcgatgtccgagatgctgattgtgcgttttcgacgaatctttgaacgtgatcgcggatatgttcacgagacatgcgaggcttctcatcgacggaagggcgggtatctgagcttgaagagctcgagacgctgcccgaacgcattttgccatggtcccatcgtgacggctttcgtttgctcgaagcactacggctgcgtaagctgtgcgaatgacttcgaaatctgtgcctgtgccgcccacgacccacgctcttgaactcttgcgccaatgcagggtgagaactggagagagaagtgcgcggtgacgaatgtccctctccaggatctcgcacttcgaccgaaaggcgcttctgcttagaaggcgtcccgatgtcatcgcctgtgtccatgataactaattctttggggttagggtatagtctacagccatccttgtcgaccaccttcgtcttgttggcaccatattccagccatgcggcatcggccagaagctctgccggtgagatcttccaatcaattcgtggtcgacgggccttcgtgctgctggttcggctgactcgccgcaagctcgaccccggagaggtaggcatcatatccataccttcatgttccccgatagacacatggcggcgatcttgttggaaaggtggcagctttaagcaatctattgggtcatactctctatgactgtatttttgctcgacgttattgatccattgatggactctttcgacgtcgtgccatccttcggcatctgcgtcgatggagcatttctcgcgatacctaacttttcggttgcgaatcatttgaagcgggttataaccacggttggatctatgtggtttagactcagcatcagccgtgactgcatctcgaagaggtggtaatgagggcagtagccgcatatattcatgaaatagatcaaaatgattccgtgctctctcagcacgagccaaagtgctttcggagaattcatatgctctctgatcctcaatcgcggatggaggcaacaaattcacaacagatgattggtctaagctcggcagtgtcccatgtgacagacgcctaccagagacctgggtaaaattgcgatacggcgattcacgctgaaactccctcgctcgtggagaatacgcatagccgttcactgttggaacagtgggttgggagacagatattggtcttcggctctcagggccaaggggtattccagaggctgtcctcctccgagattcattaagattcaaggctagattcacaatctggatcgagtccctatcaaggccaggagttgaatgtgtcacattgtcttcccgtagctcaggctgcgaggggtttccggagggctgtctatcaggagtcgtagaaggttgccaagcactattcgggtttgaacttgagtcatctgggattgatatagatgcatgatgcttatgccggatccatggaaatttcgagcgtttcttgggtaccacaatatccggttctggaacgctgcgcttctcttgagggggttccgaggggcgagggcgatgcaggctaactcttgtgcttcgcggacgaggtaacgagtcaagcaggaaaccccctgagctctgcgttctccgctggctcggtgtcctccgatttccatcacgggaactgctgcccagtgtactaccctccaactccacgctcgcttggccgtcgttctttccggacgaagtctggcgaaatgaacctccatcggatcggagaaaaggcgacgctgtttccgaggatcggtctcgtggtcgtccattcaccggagacattgaagatcgtacagggggctcgttcggttgttgcgacattgctgcaggaagggcaacaatgctagatggcaacgttcgaggaagagacagacattattcggtcagacacaagcatatgtgcaaccagccaaattggcaagggttcaaataccagtgaaattgaagtcaatgttgcacaatcagttgcactatcaggctgcaagttgtagatcggaatgcgcgtcaggccatgttacgtaatcactttattcgcacccgtgggcccgcctaggcacgaaaccgcggaagactcgagtatcagtctgatactatcagacttgttcgtttgatttatgatgagaagatttgtccagatttagagtacatactacaaactgcacaccttatataagtcaagagacataggaaagttctagcatctgggtctaaagcacaagtacaactagaggtacagttcctgtaaaacgaggatatacagggtaaaatgaattcagcttcgctcaaagtatgcgcttactcaacccgcaagcactggaggcgggcctcggcctcgataacctgggagaagaaaagtagttagtggatctgttgcaaattgccaaatcgaaaggtggaacaaaagcttacttcgagagcctgtctaacttcaagaaccttgcgaacatcacccagccagtccttgctgagaattttagcccagccctggagggtgttcatttcccgagcggcggcgtcaacatcgccctgctgcaacaggttctcagtgcgcaccagaacgctctcgacgtcatcaccctcggacaaagcatccttcttgaacatgaccttgcttaggacaaggctggcagcgtgactggcaacaccggcatcctcgggaagcaggctagccttgcggacttcacttgcaacgcggcggaaacgctcgaatatctgagtggtggaggggataccacgctggtaagcagtagggttaatagatgcaatggcagcctcgacgacggcatcaccagcagcaagctctttcacggccacaagctcacgaacgaacggccggggggtctcagcacgctcgaccacggtccgaacggcgtccagtgcgacctgcagctgctgagtcttgagattggtgtcgatcacgtcgctccatccagcggtcagcttctcgagctcgttaatgtcggctgtgagctcagtcaatttgctcagacggccctcacgctcgcgttcgaccaggctctggacctcgtggacatacttgcggttcagctcgatagcttgctcaacgagctcattttgaagacgctgctcagcaagctcctgagcgtggcggagctcagttttaaccttatgctggtatgcctgggcgagcttctcgcgctcggcctcgaactcttcacggaatgaagcgagatcagtggagcgcacttcctcaaattggcgcattaattcacgtgccgagtcatcaaaggtagcatgaagcttgttaagctcctcctgggcggtgttgcgagcctcgctgcggataccagcgatcttctcggcaatcttctccagctcgcccttcgccttggcgacaggagcagagtacttgccggagttttcatcggcgctgatgacagtaacgatgtcgttgaaggtcttaaccagatgctggacaacagcgtcatcaccatcctgcaacttgaccagttcaatagtgctcgcagaaacagcaggttgtctgggctgatccagcgagacggggttcttcgcctccgaatcaggcttcgtgtccttggagctaggcttcgaggcgtcttccttggccttcttgactacggcggtccgatcctcgggcttggcagtcgacttggtttggccgtcgtgagtttccgctgccttcttagaatcgacttcggccttcacttcttcagcaatcttccaagacagaccgctcttgccggggattgtgatgggcttttcctcttctcggggtacggccgggagacggttttggtgtctcaaggcattggggaagcggcggtagaagtcgcgctcctcaaagtagaggacgcattcttcaccgtagggaatgtactcggtaaagaaatcgtggaagttgtcggatttcagggccaggaagatgctgccaccataggcaaagccggatgtgaggatcagataaatcaagaaccgacggaaacgaccggatttgcggggagcagctgccggaggcgagggaggaagcttagattctacagaaatatcgcattaggacataaggggtgggcctcaatggtaattgatgaatgaacgggtcgtcataccttgttcagcggcctgcgagatggtcttgggggggatactggattcagaggaaggggaaaccggtgtcggaccaccggtggaagggggcttagaatcggcgaagaatcgctgcgcatgatgactgtcagtatgaagagataggacggctggggagttctctttacctggcctacaagccggttgcttgcaccggctctagacagccattgcgacgggatccgttggcggacagggtttgacagcaattgccgacccggagcaatcgaggagcgcagcatgacgagccgcacaatcgccaaaattagtggctaaaggtgatcagaaagatggatgggtaggaaaacgggaacttggttgctcagttgcgatccgccccgataatcctgcgggcggtcagggtggctttgcgcgccatttcatgcccacttccgtacatactgacatcacaaaaaatttagctggcttcggagtgcaataaaagataaaacagagattggcctattaatatgggaacctcttttccccggatattggccactggttagatgttcgggaggtcaggtgtaaacaaagaagaaatatattgacacgaacaacacaagtaacaaaaatgaatatcagttgactatacggagtcgacagaactcataaagctatctagtctgcctacactactagtatattgtgtatcttcacagcacatacaggtgaggaaaatgtattatttgagcataacatactaagaattctgaaagaggcaagggtaacgggaatagcaggaattcagcccaagacataggacgaaagaaagaagagcagatgcagacgccaggtgacaaggaacaaggagtacagaaggagcagcacggtcaaagcaccgacagatccagctgcagcatgtctaaagccaaattccatgtggcttcatggaagttaaatccttctgccaaccggggtcatgtgagcccccaattgaagaggctgagcaaggacaaaagaagcaaagaaaaatccgagagagttagattgatcatgaaccgagagtctatccctcggctccgtagcggtagggaatggtgccagagtccgatggaatgacattggcgaaatcatagaaagtcacagagttataccaccgttgaaagatgctgggatgtgtagccttaggccttctcaaacggtgggtgaggcgagggcgcactacccagggggaaatatgatcgagtaactgtttaacaattgcacgcaccagcaccctgagttccgggggcctctggtcgcaagtcaacgccgggccgaggggtcgctcgcaagttccgaggaccggcctgatccagaggtagtttcttggcgatggcggtgaatagttccttgacatttatcgaggacttagcagaggtctcgaagaaaagcaggcccgcttcacgtgcgtaggcctcggcatcagcctcttgaattgctcgcttatcagggctttctgtgacaagatcgagcttgttgcctgctagggcgatcacaatgttctcattcgcttggcgctgaagttccttcacccatgatttggctttgtctagcgacgactatagggtagtttcacgaatgttagcttctatattgcaataaagtcaaaggcgtgatgcaggattgaaccatacagcttgggtgatgtcatagacaaccacagcacagttggcattgcgatagtacatcggagccaacgacttataccgctcctggccagcggtatcccagatttcgaacttgactgtggtgctatcatcgagggagatggtctgtgtcagaaaggcggctccgatcgtcgactcgcgataatcatcgaattggtcctgaaccgaaagattagcattttattactccatgtgcgttcggctcgccgcgggaagtaatgtaatgtggggatcgttgacgactcactttaacgaatctgaggacgagcgaactctggaagatagcggtcaagtcagcggctgataaagaagatcgcaagtgttatcccaaacctttccgacggcggactctcctataaagcatgtcagccatggatcgaaagatgaaaaagaagtacaacatcatcagaacataccaagaaggacgagcttgaactgggcaaatcttgcgcccgggcgggctcctgctgcttgtcgggaagccatgatcaggagagaggagggagcgtctggagggagcgtcgaaggaggaaggaagatgaactgtcgaggaactgagatatatgattcaaggtctcaagacccggatagaagatcgagaaaaatgggagatccaagggtatggagtacaaagatttaaacacttcaaagacctcgtagtttaaggcagacaggaatagatgacggaaggcccagccacaggtgcagcggggcggtgtggctgcgtactgaccagagtggcccgctgttacttttgtaccttccgtcctttttgggaagtcgtagggagacttgaatttattttccctttgatgcttgttcctcttcaaattctcttgtaagacctcatttcaggaggtcactgtttccaactatgtctcctcctattctcccgtttcgggatatcaacctacacgcgtcgccctcccactatgcctttacttcgccatcatcacgccaagcaccaactctggtagtcgaccgaccaaccggtgatttacgtttgaacgatggcccccttccaggtgctaagcgcatctcaagtattgctggaattctcggaattctcaaattgaagcttggtaattgcacttacaaacagaaactcaggaggttgcgctaacgctcacagataaatacatcattgttattaccaaagcccagcccatgggacggttgcgcggccatatggtatacaaagttgctgggaccgaattcctccccatgcgagaacggccgcttcacgacaccgacgaagatgcctatcttacattggtgaaagacttgcttcgaaggggacccatgtacttctcctactcgctagatgtcaccaatagttttcagcgacagtcacaacatgccccagatgttccgatgtggaagggcgcagacgaccgcttcttctggaatcgcttcattcaatccgatctgatcgatttcagcctcggggcaaacgacacaagtggaattcgctacggcccccaaccaggggcagacccttacatcttaccggtaatgttcggtatgatgcgcattactccggcccgagtaaagtcgacatccttcaccttcgcgcttatcacccggcgatgcagacaccgagccggaacgagatacttctctcgcggaattgacgagcaggggaatgttgcaaactacaacgagactgaacagattgtgatcttgaatgactcgacgggtggactatctgggtttggtggaggtcaatcaatgaccagtggcaaagctgggcaagacctccaagtctactcttttgtacaaaccagaggcagtgttcccctgttttggactgaagttaacgacctcaaatatacaccgaagcttcaggttcgtgacgtcgagacttctatcgaagctgcgcgaaagcatttctccgaacagatccgcatatatggagaaaactacatggtcaacctcgtcaaccaaaagggcagggaagagaaggtcaagcgcgcatatgagcagctggttcgcacattagtcacttcctcatctgagagcaccgaggctgatgaacgcacccctgaaaagatgcatgttttggaaccagggttcaagcagaaagagatggatcatttgcattatgtgtactttgatttccacaacgagactaagggcctcaagtggcatcgcgccgagttgctcatgagccgtctgaacgacgggctgacccagggcggttatttccgtggagtggagagtcctggtgcccctggtgggcagttagatactcgttctacgcaaacgagtgtagtccgaacaaactgtatggattgtctggaccgcaccaatgtagtgcaaagcatgctcggccgctgggcagtgacacggcagcttatggatgcgggcgttctccgccctggagagactgccaacgatgaccaggagtttgaagacctgttccggaatatctgggcagacaacgcagatgtggtttccaagacttattccggtactggtgccctgaagaccgacttcactcggactggcaaacgtacgcgagccggcatgttacaagatttgaacaattccatcacacgatatgtacgcaacaatttcctggacggccctagacaagatgggtttgatgtatttttgggtacctatctcccatcggactcaacatttgccaacatccagctattccttgaccagcgaccacttgtcatccagtcagttccatatgttctcgctgctagtgtgttcatggtttcggtagcgcttttcacaagacgattgcctgatgccgctgtctggccgcttcgcctgtttatgaccttctggttgctggtggcggtttactgtttccgcttcgtgcatggacacggcatgctctatgtaagttcttcttatccaggttgaagtattgacccactgacaaattcttttttttaggtcaattggcccaagctaaacacgccgatcgctggcgctgagggatatcaggatgctctcatcaaagcacgctccgatcccatcatcggcaattggcttccttccagacgacaccagcgtggcattagcaatgcccgtctcgtctttttggaagagggcaagactaggattgagtaaatgtttcattcattccggcgttcttgggttatttctttttaccctttattctcatattctgtacacttcatggctgtgtcttctattaccattctgtttaccactacaggcctgccggcagtttcctttctgttcttgccccttcaattcaattcaattctaatcatctttcatctttgttcgatacgctgtttcttgcttgcaataacctgattttccagctctatgctgctaccgtgatttccgaatcggtcccattgttcccgctgctcggattctctcgaaaggttttcgaagagcttagccaatacatgaacactttcaaatacccatatacatcttcaaatttccttatctattgaatgtgagttgttgctcattcttaaacattacaatagatgggaatattgagaataatgagaatagctagaaaggaagttcatcaacgagagggcttttgatttttttgtcttttccaagttcaatcttctacgactagatttctaaaatatatcatgttgggactcaaaaacgtgttcctagatatcaaatatactttcacttattcttgcttataactcatacaaagtgctggaaacatccaatatgcggccttatactatacaaatttatctgtgaatgtagtttataaaataacaaacgaccatgtaactagtcagttagttagttatagtcacttagcttgagttcagtcctatgtatgcgatatgttaggaagcacgtgatcttcccggtcagtatgaaaagggtttcccgaggagagcggggatcaaccagtgaatcataaattgttagagctaccggggtttctttaaccacccctgctcatttgaggactttaggcacgggtttaatttgttcatgcgagggctttgcacctctattcgctcgcaattttgcacaaggcgattttcgacttgttcgcccaccatgactcgaacatatgaggtatgccactccgggctttgcgacaaggaataattatgtcaaagtatagcatatactgattttggaatacataggctgcgattgcatccctcaactcattgcagactaactatgcgattgtggcggcgttcaagaaatctacaacgaggcaacagatcaacgagcaatccctcccggagacagtggagtggttgcggcgcattggatacaaggtgcgctgatggcagggatcttgttccctcattattggagctaatgcgagatatttacgttctctagccttccgatctcaatcggctgaacgcaattcatgtcgccggcacgaaaggcaagggctcgacctccgcattcatctctaccattctctctcaatatagccgaaaagatgcggatcaacctggatccaatcttaagatcggtctctatacctccccacaccttcggttcgcacgtgagcgcataaagatcaacaatgccccattgtccgaagaacagtttgcgcgctatttcttcgaagtgtgggatcgccttgagcactctgctaaattgctgggccaggatcccaccgggcctgggacgaaaccacaatatttccgatacttgaccgtgatggcattccatacctacttgagcgagggcgtggacgccgcggtgatcgaatgtggaatcggtggtcaatatgactgtaccaacgtgatcccacagccgaaggtgacagcgattagcagtcttggaattgatcacgttgatttgcttggacatacgattgaggaaatcgcgtggcacaaggctggcattttcaagcgaggcgtaaatggattcgcggcaccacaacctctggctgcggaacaagttttggctaaacgcgccgaggaggctggtgctcaactggaaatcgtggcttgtcatccagagcttcgtcccgaaagtagcaagatcacccttgggttggctggagacttccagtataccaatgcctcagtggcagtggcagttgccgcggacttcttgcgccaggttgacattgatgttccggacaatatcaagacagaaccactaccggcaaagttcaagaccgggctcgaggaaactcgcctaggtggcaggtgtgaaacccgatttgagaagaatgtctcctggtatatcgatggcggacacactctggagagcatccggctggctggccagtggtttgcgtcgcgtatccaggccgactcatcgtccgaggacgtagccgccagaaagacacggattttgattttcaaccaacagactcgtaacagcacagctcttgctcgtgctctccacgagacccttgcgttcgcccttggaaatgatagcccattctctcatgccctattctgcacgaacattacctacaaacaggcgggcttccgacccgacttggttagtatgaacactaatgctgatgacctcgaactccttcgagtccaaaaatcacttgccgtggagtggaatgctattgaccctcatgcgcaaacacatgtttttggtacaattgaggaggctgttgattttgcgcgggaagttgcgggccaggaacgcaaggtcctgcagaaggatgaagctccggtcatgacttttgtcaccggtagcatccatttagtcggaggattccttgatgtggtcgagacaaaaccacccaccgacgcatgattcccagacgattggtagcctggagctccagagattcttgcattcattgtatcaaccacatgagatatgcttttggcttagtataggacggacatagatgtgtttctacttggatttcaacaattcctcgattttaagcatagtttcatttacaatcgtttaaatgataccatattcgaaagttgtacgtgcttgggatctacatggactttgcatatgtggatgccgaggttcctgatgtaggccattaaacgtttattcgctgagcaggggtcttcactgctcacagtggagcactagtactccctacagaggtgcaacgtatccataaataataattaacaattatttccactactataaataatagcgtgagtgaagcaagttatgtagagttcgtcttaaacttgatcacagtattattaagtcagattgcccgcacgacccccaccagagatccgcggcgtttgaaacgtggggcccaacccaattccttcttccacaacaccccagcgcatcatgtccgactccagcgataagaagggcaaggctcccaagcgcaatgacaatgagtctggcgctccatcagactcaggtaatggtagggctccttccagcctcccacactagaccctagcgcagctgttgacattcaaattctagaagcagggaagaagctccctgcgaagttcgcttccctactcctcgaacaaaacccggccttgaagagcgagctagctgcgatggacaaggaccaagctgcggccctactgcacaacatggacctctcgcagatgctgactggattggcggtgggaggtaagaaccagaaggatatggcctcgtacaagttttggcagacacaaccagtgcctgccttcgaggacgctggaaaaaaggagattgttcaaggacctatcaagatcatcgacccagagaaggtttctaagacccccgatgcgctcgttgagggatttgagtggtgtactcttgacctgacaaatgaggaagagctgaaagagctctacgagcttctcaacaagcattatgtcgaggatgataatgccatgttccgtttcaactactcggaatccttcctccattggtacgattgagtcttgaatatgttacctatctcagaatgttaatgctaaatatatagggccctgatgtctcctggatggaagaaggaatggcatgttggtgtacgcgccaccaagtcgcgcaagctggttgcatccatttgcggtgtcccgactgaactccgcgtccgcggcgagcgcctcaaggtgacggagatcaacttcctgtgtatccacaagaagctccgctccaagcgcttgacccccgttttgatcaaggagattacccgccgttgctacctcaggggcatctaccaggccatctacactggaggtataatcctacccacacccgtcagctcctgccgctactaccaccgttctctggattggttgaagctctacgatgttggcttctcgcctctgcctcatggctcgaccaaggcccgccaggtcactaagaatcatctgcctagccagacgtcgacacctggtctgcggcctatggagtccaaggacattgatgccgtctttgatttgctggagcgatacatgcggcgctttgacctgaaccaggcctttacacgggaagaaattgaccactggcttgtgtacaagaagcagccagggaaagaccaggttgtctggtcatacgttgccgaagacccagaaacccacaagatcactgattttgtctctttctacaatctcgagtctactgtgatcgacaatcccaaccatgattccgtccatgccgcatacctgtactactatgcaaccgagagcgcgttctctaacgacaagcaggctttcaaggagcgcttgcagctcttgatgaacgatgccctaatttgcgcaaagcaggtatgttgcaatgtgctatatctcattctacatgctaatctcgtcttttttattttatttgcttaggcccgtttcgacgtcttcaatgctctcacctcgcacgacaaccccctcttcctcgaggcgctcaagttcggtgctggcgatggccagctccacttctacctttataactatcgtgctgcacctatcggtggtggaattaactcgaaaaacttgcccgatgagtcgaagatgggaggtgtcggaatcgtcatgctgtaggcttgacgctttggctagtaaatctaacgtcggataccccggaaacgaattgcttttccttgtaccgtgctagcgatcaaaagaatatgaaaatcaaacgaacattttatataccaatgttttctggctagacttgtggctggccctagcgaatttcgtgttggcccagacagggaacactgaaagtacttgaggtattacacggctttccccgtttctatacttttaggaagaagctatcggaggaggcaagatctgttgagtacgaagagacttaatctaacgcgaggtctccgagaggagggaggctgagatcgggagtgttctggttactggagataggatatacccatcacatgatctggggtatcacatcaccacgtgataaaactgatggtcatgtggtcctgaggcgctgtcattacgtaattctcgctgatcatttgaagtctcaggcaggcataccatgcctcaggcaaccgactgacgtcgtcgcatggaattcggctccccatgttgacttactactgtttgtcgatgctgtggttttttcatcctgaacattttattcagcaacttttcctttccttcaaactccttgctcgatatcggctcttgagcactgcgacggaacgctgccgtagctagcagtggggtcatccccgcaacaaccatcaacgatgggtgcagcccagtcgaatgagcatggcgcatcatccccaggtaagttctatttgctatatctgtggttagttttatgagacacatgaatgttctactctctcgatcgaccgtaattgtcaataaatgcctcaattttgccatggatatttctccgtcttgtcaacaatagttgtctctgaccacatgcataaacagaagagttgagctacatgcttgctgagcgcttcgccacaaaatgctttacgccattagagctcacacatttcaaagacaacttcttctctcgggccttagagcagggaggcctgcggcactggaatgagaaagtcctttcagacttcttgggtatcccagacggtatctttacctcttcacaggaacaaccgttagatgcagggccggtgatttttcgcatggtttcttatctgggagcctttccattccaaaacacgctcgcgcccagtgtattgacctttgaggccatggttaaggtcgttgtgcttttgacagaccgctacgggaaagcgctgaagcgagggcacaaagaccgaatcaagttactctttggaagcttggctgatgtggggaggaagactcccgccgaggctaatggagaatgtacgaccgaggattccgaagcttcggctgggaattcccatgcgctggggttctctatagataaaccagccaatgatgattacgatgaagatgaggatgatgatctcgcacttgcagcactggactctctcgatgcgattgaagtattcaaacacgatcaccgtgttgacaagaccgtttatgagacccgaatttctatcgatacgttccgccgcttggttatgctactccttgtcattgcacccctgaagccattggattctttgaagatatatacatctggactggatgttcggcgtatggagtcggttaagaacgaggcagacagtattattgcggccttttcaccggaagagagtgatggggggatatcttacaagtcttttgcccggacgatatcactgtctcttccatatctattcgacccgctgactgcccttttcgagcacctgcttttcagcaaaaatctgaacctatctcaacgccgccataaaggtctagctacggagaccgaacccgaggagagcgaggagaacgaagaacctcccctacaacccgctgcacttacacttccgggaagtttcgaatcggccatattaaatccgacagttaattcgcatctttcgttcttcctcccatctatctcacccgatatcaatatcctccgaggtggcgtcaaactacatcccgtcttctctacaaacgcccacgggtcttccttaacatatttctcccaccacgtcctcacctggcaatctgccactctcctcatcctgcaaggggctctagtagattcaagcagtgaagagttgataacactaggggcctacattccccaaacgtggaaaaccgcctcatcgacctcaggctcatcttcaaaaacatctgacatcctcccctgtctctttcaactatccccaaagcacctcctcctcccgggaaacccctccccatccgcaaagaagcccaacaccccaatcgcctacttctcacccaacaccggcatcgcaatcggctgccaaatccccgctccgtcccgcacgcaccaaacctacccgaccccgcatggagcaggcagcctcataatcgacgcgaacatcgaaacggccgagttccacgccgcacccattggacacgacggcgccttcttacccgctagtaatacatcgcccgaagacccgcccacaaagatcaagcttgatctgtataccctggagatttggggcatcgttccagacccagaggcgtcatcatccgcagagacgaacttgggtcccgtggagattcagcgtgcaaagtgggaatttgaggcacgggaggctgagcgtcgtcgtaatatcaatatcaaggctggagctggggattcggcggccgagagtgcgaggtggcttttggaggcggctggtattattggagatgagtctagatattctggtgggaggggttagggtggtgggctgtgccgagcaagcacgtctgtttgaatgtcctacgtggtataacttctgcggcttggtgtccttggtgttgagattcgttatcggaatcctataataaatacctgccctaccagcctgaatttttcctactcaaatctcatcgcattttcagcagaatcttgctataccatccagtcgctgtcttctaaacatatgtagttcaggggcattgtattactttcgcaaaacgtgggtctgagagatgacaagtagtacatctctaaacgcaagatcttgaacattccatcgttgtacatttaagaaactgtcacacgtaaaaccttacacaaccttgggaagtacaagcatcattcgagtgccaccttcggtttagagtttcacataaatccgatctgtttcgaagggacccttcgatgaacctaacatcatgctttcaatggcggtaacccgcttggcgcatcatagaaatctttcagatcttcttcatcctcctcgaattcgaagccagaattctccccctccgattcgtcgccagcgagctgaacacgggaaagacgactgcgggttccggaaccgagattgcccgaagaagcaggtgttccgtccctttggaaggattctgagggcacctcgcgaggtagccgcatagctaggtacccatccggcgcacgttcggcgcgatccatgatatcattcatatatttgcgcacctcgtcggctggcttgacgactcgcgctagaggctcgaggattttggcattaggggcgtgaatgcggaacgttactggttgccagtattccttaaaatttgcctcattggcaggagtccctgggagcccgggggttaggatgcctgtttgatcggtgggttcctgcttttgtggtgttcccgttgtgggtgtgcatggctggctgggcgctgggctatcggttggtagtttgtccttgtctattttgactttcggttcactcttcttagctttcgatgcccctttgcctttgcttttggagttggcagcttctgtggcggtttcgagagggaaggttgtatttggaggaactttccggactaccaaaaacgaggcgatgactgtgttttcagctgggagccattccagaatggtatactcaggaaaaagatagcggtcacccgaaccggcatgacctgaagtactacttccgtatggagtcaagggagaagtgaattcaaacacgacagacttgtagtttatcggtggagatccaagtggagatacgtaagagattgaagccgggcgggggaatggaacaggcgtagtaaattggggtggtcgagactgaagtggaggttgtgacccataagaaggttgctggtggggggcatatggtggtccgggtcgtgctcctggctgctgagcgctggctggtggtgtcgggtttaccacgggagtctgctgctgcgtagtagaagcagtggctggggtgcttacagcaccaggagtcgctgatggggtcggaaccactgggcgcgctgcttcggacggcgcagactgggaggtgctgtgttctgtggctggttgctcttccttggcagcggtcgacccggtggcactctggggaggcttaggagcctggcttggtggatcttgcgcaggggtcggaggctgcgtctccgtcttcagaggtggctgcttcggacctttggatggggtctgcgatgtttgtggggatttctctagcgatactgacttcgtcccaccatgttgttgtttctgggtctgggtctggggttgtggagtgggggttgactgttgcgtaatgggttgtcctgctgaagattgctgccggtgttcttgctgctctcttgatttgatgattgcattgagttcgtcgatatgtgcttggaaagcccggagttgctcctgagatgcttggcttgacgcaacaacacgcatcaaggccttaagttcagggtcagcagctgcccttgtggctagcatttggatcacaggatctggactgggcttggctggctggctcttttgcccatgtggcggcttttgtcctccttgaggagagggtgcgttcgggccacgagcttgttggggcgaagggtggctgcctgtatacccagggcgacctggaggagcgggagaatattgcgcaggtcgttgttgattggatgacgtgggatacggtcggtattgttggaagttattagggtggccgtagtgaaccatcggtcgttgcgggggtgcgtattgcaatgccggcggcgcactgggatctttgacaatgtaaatcgtagcatcaaagaaatggggaccgatggtgacatcgcagggcccgatttttgccatagtgtcctttgacgggttgttcttctcgatctgctcgcgcttcgtcttcttcggctttgtgtagtatcgaacaagaatgccatcgctcagccactttttcttcgatcgttcgagtgaagcgaggagaaccgcactgttgagataagacagaataatgtcagtcatgcaacaccgatgggggccgcgatcgcaaacctttcggcgattgattggtactcattgtccgacaaggatagtgcctgtcgcgtgcggacaataggcaaaggatctccatccttaacctttgttggtaaaggagcgtcaactaattcgggggatggggcgcgaggagttggcgcctttttcttgtgagactgcggcgtggcttcggagacacgtcttttggctgcagattcgcggcggtcacgcgcggggagcttgcgcttttcagccatggagaattcaatgatataatcacgatacccacgatggaagtataacaaacattctataacggaagtttggatggagagaggatggaagggagaaatgagagagacgcgataacgcgccgcttatcgccgcctccgccaagattgtccgctcacctccgttggtggttgccaacagagattaatcaactcaaccccaaaacgcataatggttgagcttaagcctatttttaggaaggcttactggtcccttgcagcaggtggcctgctatacgtgctgtgtatcctctccttgaccttcccagaggttcaacgttcgtatgtatctagttccccccgggcctacctccagagtgagctaatatagataacacagtgttctttatgccaacaagatcaatcccagcttgtggcaggatgtcaaccaagtcgaacagtttggatttttaagtatggcatccctaggggaacaacggaagtatgtttgctaaccgatccccaaaggaacccaagtccaaccgtttcatttggttacgcccgacaatgaaaccgtttacggctggcatttgatgcccttgcatctttgcctggagttcgaaaaggaattaatggagaatccctctacgggcccagcggaggactacacgaagacagttgcctacaagcttctcgccaatgaccccaatgcacgagttgtggttagctgtaagtgatagacaacctagattccgactgcaaaaaactgacaggcaagtccacggaaatgcggcgcatttgggttccgctcaacgccctgccacttacaactcgatgctaagcctatctaccccatcaaacccagtccacgtctttgcaattgactatcgcggctttggtgttagcactggaaatcccactgaggaaggccttatcacggatggtgtgtccctcattaacttccttaccgcagggccattagaggttcccacctcccgcatcgtcatcgtgggccaaagtcttggaactgcagtaacaactgcagtggcagagcgttttgcattcggatcatctgacccagcagctatccaaccggctatcaagaacgccgatccatttgctggcgtggtcctattggcatctttcagcagcctagccaatctcatcgagtcctacagcttcaaaggcctcaccccgcctatgctctctcctatcatgggatatcctcgatctcaacagtggctgttgagccacattgtggaccactgggacacggctgggagactggcgcgtctcaccggcgttaatactacttccttgaacgctgtagatatgggctacattgataaaagccttgatctcacgatagttcatgcttttgatgatgctgaaattccctggtatgaaggacgccgcgtttgggaggctgcgacgggcagacatgtcaagggtgctcctggtgctatgacgtatctcaaatccgaggatggcaaccctagcgaggtcaagatctggaagaatgagatcagcaatgaagatggtagtgaggttgtcaaaacagtcagatgggaacggattcgatacggtggtatgttgaagcaacaccctctggctataaattcgacagactgaccataatcttttaggtcacaatcgcgttgcatcaggctcagtggctggtatcgctgttatgagggcttttgagcagtaatcggccgacatattgataatccctataaagcctcgggaaatacataaactcactgatcctagccagcgtaagggtcacggatggacagcgtaacgatctcaataaatgataaagtgcatgtctttcgttaattacacatagaatatgaggacctgtgggattgacgccgaaaatgaccgcttttgaggccagaaacggctgcctttccacccgtaactttggatgtccagccccttgaccgcccactgccctataataccactattctgcacccgcccagtagcgttagtcatcctccggtcctgatgttgacgctcgacttatacggtttttcccctcgtttctactggcaaccaaaacgacgccgaaaatggctccctttcagctgaattcaagtcccctcccttttcgcccagtctatttaagcgcctataatatacttcgccttccctcccctccggtatccttatacctctcattctcttatcctcgttacctatacctcgagacaacctcgactttatcgtttcctataatataaatttcctaccctagtctttgttctattcttctctatagtacctacgcctatatatccggcttaaaccgatgagtactaatactagaccgatcctattctttataaggaaacttaagtaagactagaatatttttgtagtattagatagctccctctaaactttaagctaaagaccttagaaggtatcgctattatcgaatattattagcgaaagtaagtacttacttagttaggaaaagtcttataactaagactaatataggaatagatattatattcaattaaatgaggattatatagactttctccttttagaggatctaataatctatataaacttttttgattagatatttaaaatattataaaagaaactgctttagttatataataaatactagcgatacctttattaatactttaagctattcgcctattactgtattagtaagaatacctattaatagatataacgagtaggttatatcctatctattcctaatagagtgtacttaccttagaaaagtttctcgaaggtatattcctagccgagcgtaaaattccccgataaataaaggacaaaaatattctagatatagatacttttaatatgatttaccggtattactaggtctattcgagattcttttatcacaggagtataattatttagtttactatagtctagctctagtccgctattataagtacacaacctagtatcttacttccttaagacagcttattacctagtaatctagttttaggtaaacgtaaatgggataacagcttctagagtgatcttctaaagtacatttccttaaaagatcttctagacttagtctactattgtaatatcgaacttttctatttaaaagacctttaaagtaaacataatatcctctgtactattatcgagttttataatcttaaaggttaactagaaggcgctaataggtaagctagaattttaggttagatttcttataaactaaccttaatactaatccttactaatagaactaaattctttatatatagcgattattaactagtatattacctaatagcacagatcattatatttactttccgcgatagagcttttactaatactaaccttatactaaagcttatttagtagctataagttctaagaggtagtttatctctttccctctaatagaagcctaaggttcttaatatacctctcctttaatatcttagatatactctatatagctatagacttaataggtctttactaataacctataattcaagctagcaggcgcttaaggagttaggttaagatactagatttaaagataatattaggtattacaatttttgctactagatagtaaataaagtcaatagtatatcacttactaaatataatataatagattcattttcgctataatagataggatctcttacaatagagctaactatctacttacagaaaattttactaaccaggagtaataaagggtacttaggtagtctagtaatataatatttaaaaagtattactaatcacaatttattatatataaccttcagtatattattcttcttcagctctcctaagaaggtctagtacactttactaagagtatacttaagaagagagatttattagtactatctaatcttaccgaaacttataaatatactatttactaaaaccctaaaattctataactaagatataagaaaagagagcttatagtagagatataatctatagctagtataattaagaatacctataatacctttctatacctcttccaaaggtataagaccattaaaaaagacctagctaaactttagaaatcattagtaatcgaaactcataagatagctagaaaggactattttaataatatccctatacttaaagttaactgatagattaagtaaatacttcttagtaaatctaatattaaggaatataatactaatagttctactaaagaaaactaggagctccctatcctagactatatatttcctaaacgagcttagcttatagagaacttttatagtcctaatgcagaagacttttataaagataaattacttacttaatatatctaggttactaaggacatagttacacttctactactttataagccaagtaagtaaggcaactatattaattagattcttaataaagaggaaaatatacctattaaatagcctaagtaactagtacctaataataatagataaatatatctaatagatatttgtattatctactttagtaaatcttatcgcttagtatctaaccctcctctacataaatttccttctaagtaaccagactcacttcatcgttatcttatcgactcttatctactttatatatataataggattagctataactaggaagtatactgtattcttcctaagtttactaaaatcaccgaatttttagcctatactaataaagaatataaatataatattaatattaaactatattatcttaccgaaaggctataggttagctatagtaatagttcttccagagaaatatctatagaatcagagaatcagtaaggcaccgaaacccccgcctcctctatcaattttaatataataaatattaatcctcaattaataagacccagccctattactatcgcgaagctattagcctacctatctaaaaccaatatttctacctccccttccctaataataaccactaacttaaattcagcagagatttctatacagcaagtaataaggggaatagtaaaggcagtaaatttagaacctagccctaagctagaatctttatcacagtatataacacgcttatcttaaaaaagtaggcacctaaaagagcagcctaaggggcagcagagggataaaggacaaccaggtaaaataaaggtatctactatcaaatatatactatatcgattaaagcgattataagctcagtgatttatataaccttagggataattcgttttatttatatatttagatatagtttaagagattaatagtagaccttatcttagaagtatttctagcttagtaatatataagttctagactatagtttacttcaaatagctataaagagtaacttatattctaatagtatttaaagattatattacagaataatagtatggtaattaggttaagttaggttatatagtaacaatagccttaggtccttttataaagctcttccttacctattcctagcgtttagggtagaaaagaataacttccatccctcctagaaggaatatatatataagaggctacctaccttcttttctcttttaatagttaaactagtcttatctttaatatataccggagttagataggtcacatttccctagttaaaggctctaatatcataaatactaagagagtataaggatatagcgttaaatcgtagaaagctctatataaaggccagctctatatatatagagcataataataacttgtatatatttagacttatataacgcagtagttacaaagctatatcacttttgataagctataggtatagggtatatctaaccagcttagtaagaggagttattagagagtcctaatcgaagcttagctatagagaatcattagaaggtttaagatatataagctaaataacctttaaagttaggttatagcccttaagagtagctagtaatagctagatataatacttataagacctcggttatattatatcaaacatctagtagtaatccctctcctaatcctcgtggccctttatattataaaatactaaaaccaattcttttaagttaaagaggagattaaaagtaagttttattaaagttaaatctctccctacttctataatctcttattacttagtatatatccgttatatcatcttataaatatatatatataaagggtgatcgcctaaaaggtattctattttatcctaatcctcactaccttctatatcatcgtagcctttacatatatcgatataattattaggggtaaggatttctattttaaaaatattatactcttatatttctagctaaacgtcagtcttttctatatataattagcttatagatccttaccaggattaagcaacattggggcaatatattcaaaggaaacaatatactaacgtaagcttaattttaaaatactttctaataggtcaaatctattattcaagaatttaatactaattttatgaaatagaacaggtaagcagacatcccttattcagcagctaataagtgaaagctatttgatttattaattatcaagacaattaacgatattaaagaggatttcggtagacagcagctctattctaattagttaatagacttaacggttctagaatctctctagaaagtgataccagaggatataaaagagctagattctacgcctttatataggtaaggctagatatatcgagtcgatgattagcttctaaggagataactaaacataatattcttaatcgcaataacgaaaccaaaatagatactatatactcacagtacgtcccaccgaagagccccggccacatagaagggaaaacgtcatataaactagctcttagtactacttctctccttatccaatcattctaggcataacccagacttagaatagtctagaggtaactaggaaatacgcacaatggttcttatctaatacctaccctgtcccagtaagggctagtgttattggcttattagctaaagggtgggcccctgcagtagccttcgattcagtggtagtctacacccctctagcagctgctttctttttagcagtctactaattaattgccaaactttaaagcagtcacagtgatacgatcatggtcagaatgatatataatcgcttagacattctatatctgagggccttcttctaaaacatatatatccctacctagccatcctttaatattaggcttaccttacttcagcgtaatactatgttactaatctttccttatactacctcccttgataagaattactctataatatataggagtaccccttctatctatatacatataacagataaaggtctgtataagagggaaatacatataaacctgcataggcttaggaaggaatatctatattattatatatctgtttcgatatcgatctataaggggttcgttatataaatataggtagatagatttccttatagtttaggacccccnnnnnnnnnnnnnnnnnnnnnnnnnnnnnnnnnnnnnnnnnnnnnnnnnnnnnnnnnnnnnnnnnnnnnnnnnnnnnnnnnnnnnnnnnnnnnnnnnnnnnnnnnnnnnnnnnnnnnnnnnnnnnnnnnnnnnnnnnnnnnnnnnnnnnnnnnnnnnnnnnnnnnnnnnnnnnnnnnnnnnnnnnnnnnnnnnnnnnnnnnnnnnnnnnnnnnnnnnnnnnnnnnnnnnnnnnnnnnnnnnnnnnnnnnnnnnnnnnnnnnnnnnnnnnnnnnnnnnnnnnnnnnnnnnnnnnnnnnnnnnnnnnnnnnnnnnnnnnnnnnnnnnnnnnnnnnnnnnnnnnnnnnnnnnnnnnnnnnnnnnnnnnnnnnnnnnnnnnnnnnnnnnnnnnnnnnnnnnnnnnnnnnnnnnnnnnnnnnnnnnnnnnnnnnnnnnnnnnnnnnnnnnnnnnnnnnnnnnnnnnnnnnnnnnnnnnnnnnnnnnnnnnnnnnnnnnnnnnnnnnnnnnnnnnnnnnnnnnnnnnnnnnnnnnnnnnnnnnnnnnnnnnnnnnnnnnnnnnnnnnnnnnnnnnnnnnnnnnnnnnnnnnnnnnnnnnnnnnnnnnnnnnnnnnnnnnnnnnnnnnnnnnnnnnnnnnnnnnnnnnnnnnnnnnnnnnnnnnnnnnnnnnnnnnnnnnnnnnnnnnnnnnnnnnnnnnnnnnnnnnnnnnnnnnnnnnnnnnnnnnnnnnnnnnnnnnnnnnnnnnnnnnnnnnnnnnnnnnnnnnnnnnnnnnnnnnnnnnnnnnnnnnnnnnnnnnnnnnnnnnnnnnnnnnnnnnnnnnnnnnnnnnnnnnnnnnnnnnnnnnnnnnnnnnnnnnnnnnnnnnnnnnnnnnnnnnnnnnnnnnnnnnnnnnnnnnnnnnnnnnnnnnnnnnnnnnnnnnnnnnnnnnnnnnnnnnnnnnnnnnnnnnnnnnnnnnnnnnnnnnnnnnnnnnnnnnnnnnnnnnnnnnnnnnnnnnnnnnnnnnnnnnnnnnnnnnnnnnnnnnnnnnnnnnnnnnnnnnnnnnnnnnnnnnnnnnnnnnnnnnnnnnnnnnnnnnnnnnnnnnnnnnnnnnnnnnnnnnnnnnnnnnnnnnnnnnnnnnnnnnnnnnnnnnnnnnnnnnnnnnnnnnnnnnnnnnnnnnnnnnnnnnnnnnnnnnnnnnnnnnnnnnnnnnnnnnnnnnnnnnnnnnnnnnnnnnnnnnnnnnnnnnnnnnnnnnnnnnnnnnnnnnnnnnnnnnnnnnnnnnnnnnnnnnnnnnnnnnnnnnnnnnnnnnnnnnnnnnnnnnnnnnnnnnnnnnnnnnnnnnnnnnnnnnnnnnnnnnnnnnnnnnnnnnnnnnnnnnnnnnnnnnnnnnnnnnnnnnnnnnnnnnnnnnnnnnnnnnnnnnnnnnnnnnnnnnnnnnnnnnnnnnnnnnnnnnnnnnnnnnnnnnnnnnnnnnnnnnnnnnnnnnnnnnnnnnnnnnnnnnnnnnnnnnnnnnnnnnnnnnnnnnnnnnnnnnnnnnnnnnnnnnnnnnnnnnnnnnnnnnnnnnnnnnnnnnnnnnnnnnnnnnnnnnnnnnnnnnnnnnnnnnnnnnnnnnnnnnnnnnnnnnnnnnnnnnnnnnnnnnnnnnnnnnnnnnnnnnnnnnnnnnnnnnnnnnnnnnnnnnnnnnnnnnnnnnnnnnnnnnnnnnnnnnnnnnnnnnnnnnnnnnnnnnnnnnnnnnnnnnnnnnnnnnnnnnnnnnnnnnnnnnnnnnnnnnnnnnnnnnnnnnnnnnnnnnnnnnnnnnnnnnnnnnnnnnnnnnnnnnnnnnnnnnnnnnnnnnnnnnnnnnnnnnnnnnnnnnnnnnnnnnnnnnnnnnnnnnnnnnnnnnnnnnnnnnnnnnnnnnnnnnnnnnnnnnnnnnnnnnnnnnnnnnnnnnnnnnnnnnnnnnnnnnnnnnnnnnnnnnnnnnnnnnnnnnnnnnnnnnnnnnnnnnnnnnnnnnnnnnnnnnnnnnnnnnnnnnnnnnnnnnnnnnnnnnnnnnnnnnnnnnnnnnnnnnnnnnnnnnnnnnnnnnnnnnnnnnnnnnnnnnnnnnnnnnnnnnnnnnnnnnnnnnnnnnnnnnnnnnnnnnnnnnnnnnnnnnnnnnnnnnnnnnnnnnnnnnnnnnnnnnnnnnnnnnnnnnnnnnnnnnnnnnnnnnnnnnnnnnnnnnnnnnnnnnnnnnnnnnnnnnnnnnnnnnnnnnnnnnnnnnnnnnnnnnnnnnnnnnnnnnnnnnnnnnnnnnnnnnnnnnnnnnnnnnnnnnnnnnnnnnnnnnnnnnnnnnnnnnnnnnnnnnnnnnnnnnnnnnnnnnnnnnnnnnnnnnnnnnnnnnnnnnnnnnnnnnnnnnnnnnnnnnnnnnnnnnnnnnnnnnnnnnnnnnnnnnnnnnnnnnnnnnnnnnnnnnnnnnnnnnnnnnnnnnnnnnnnnnnnnnnnnnnnnnnnnnnnnnnnnnnnnnnnnnnnnnnnnnnnnnnnnnnnnnnnnnnnnnnnnnnnnnnnnnnnnnnnnnnnnnnnnnnnnnnnnnnnnnnnnnnnnnnnnnnnnnnnnnnnnnnnnnnnnnnnnnnnnnnnnnnnnnnnnnnnnnnnnnnnnnnnnnnnnnnnnnnnnnnnnnnnnnnnnnnnnnnnnnnnnnnnnnnnnnnnnnnnnnnnnnnnnnnnnnnnnnnnnnnnnnnnnnnnnnnnnnnnnnnnnnnnnnnnnnnnnnnnnnnnnnnnnnnnnnnnnnnnnnnnnnnnnnnnnnnnnnnnnnnnnnnnnnnnnnnnnnnnnnnnnnnnnnnnnnnnnnnnnnnnnnnnnnnnnnnnnnnnnnnnnnnnnnnnnnnnnnnnnnnnnnnnnnnnnnnnnnnnnnnnnnnnnnnnnnnnnnnnnnnnnnnnnnnnnnnnnnnnnnnnnnnnnnnnnnnnnnnnnnnnnnnnnnnnnnnnnnnnnnnnnnnnnnnnnnnnnnnnnnnnnnnnnnnnnnnnnnnnnnnnnnnnnnnnnnnnnnnnnnnnnnnnnnnnnnnnnnnnnnnnnnnnnnnnnnnnnnnnnnnnnnnnnnnnnnnnnnnnnnnnnnnnnnnnnnnnnnnnnnnnnnnnnnnnnnnnnnnnnnnnnnnnnnnnnnnnnnnnnnnnnnnnnnnnnnnnnnnnnnnnnnnnnnnnnnnnnnnnnnnnnnnnnnnnnnnnnnnnnnnnnnnnnnnnnnnnnnnnnnnnnnnnnnnnnnnnnnnnnnnnnnnnnnnnnnnnnnnnnnnnnnnnnnnnnnnnnnnnnnnnnnnnnnnnnnnnnnnnnnnnnnnnnnnnnnnnnnnnnnnnnnnnnnnnnnnnnnnnnnnnnnnnnnnnnnnnnnnnnnnnnnnnnnnnnnnnnnnnnnnnnnnnnnnnnnnnnnnnnnnnnnnnnnnnnnnnnnnnnnnnnnnnnnnnnnnnnnnnnnnnnnnnnnnnnnnnnnnnnnnnnnnnnnnnnnnnnnnnnnnnnnnnnnnnnnnnnnnnnnnnnnnnnnnnnnnnnnnnnnnnnnnnnnnnnnnnnnnnnnnnnnnnnnnnnnnnnnnnnnnnnnnnnnnnnnnnnnnnnnnnnnnnnnnnnnnnnnnnnnnnnnnnnnnnnnnnnnnnnnnnnnnnnnnnnnnnnnnnnnnnnnnnnnnnnnnnnnnnnnnnnnnnnnnnnnnnnnnnnnnnnnnnnnnnnnnnnnnnnnnnnnnnnnnnnnnnnnnnnnnnnnnnnnnnnnnnnnnnnnnnnnnnnnnnnnnnnnnnnnnnnnnnnnnnnnnnnnnnnnnnnnnnnnnnnnnnnnnnnnnnnnnnnnnnnnnnnnnnnnnnnnnnnnnnnnnnnnnnnnnnnnnnnnnnnnnnnnnnnnnnnnnnnnnnnnnnnnnnnnnnnnnnnnnnnnnnnnnnnnnnnnnnnnnnnnnnnnnnnnnnnnnnnnnnnnnnnnnnnnnnnnnnnnnnnnnnnnnnnnnnnnnnnnnnnnnnnnnnnnnnnnnnnnnnnnnnnnnnnnnnnnnnnnnnnnnnnnnnnnnnnnnnnnnnnnnnnnnnnnnnnnnnnnnnnnnnnnnnnnnnnnnnnnnnnnnnnnnnnnnnnnnnnnnnnnnnnnnnnnnnnnnnnnnnnnnnnnnnnnnnnnnnnnnnnnnnnnnnnnnnnnnnnnnnnnnnnnnnnnnnnnnnnnnnnnnnnnnnnnnnnnnnnnnnnnnnnnnnnnnnnnnnnnnnnnnnnnnnnnnnnnnnnnnnnnnnnnnnnnnnnnnnnnnnnnnnnnnnnnnnnnnnnnnnnnnnnnnnnnnnnnnnnnnnnnnnnnnnnnnnnnnnnnnnnnnnnnnnnnnnnnnnnnnnnnnnnnnnnnnnnnnnnnnnnnnnnnnnnnnnnnnnnnnnnnnnnnnnnnnnnnnnnnnnnnnnnnnnnnnnnnnnnnnnnnnnnnnnnnnnnnnnnnnnnnnnnnnnnnnnnnnnnnnnnnnnnnnnnnnnnnnnnnnnnnnnnnnnnnnnnnnnnnnnnnnnnnnnnnnnnnnnnnnnnnnnnnnnnnnnnnnnnnnnnnnnnnnnnnnnnnnnnnnnnnnnnnnnnnnnnnnnnnnnnnnnnnnnnnnnnnnnnnnnnnnnnnnnnnnnnnnnnnnnnnnnnnnnnnnnnnnnnnnnnnnnnnnnnnnnnnnnnnnnnnnnnnnnnnnnnnnnnnnnnnnnnnnnnnnnnnnnnnnnnnnnnnnnnnnnnnnnnnnnnnnnnnnnnnnnnnnnnnnnnnnnnnnnnnnnnnnnnnnnnnnnnnnnnnnnnnnnnnnnnnnnnnnnnnnnnnnnnnnnnnnnnnnnnnnnnnnnnnnnnnnnnnnnnnnnnnnnnnnnnnnnnnnnnnnnnnnnnnnnnnnnnnnnnnnnnnnnnnnnnnnnnnnnnnnnnnnnnnnnnnnnnnnnnnnnnnnnnnnnnnnnnnnnnnnnnnnnnnnnnnnnnnnnnnnnnnnnnnnnnnnnnnnnnnnnnnnnnnnnnnnnnnnnnnnnnnnnnnnnnnnnnnnnnnnnnnnnnnnnnnnnnnnnnnnnnnnnnnnnnnnnnnnnnnnnnnnnnnnnnnnnnnnnnnnnnnnnnnnnnnnnnnnnnnnnnnnnnnnnnnnnnnnnnnnnnnnnnnnnnnnnnnnnnnnnnnnnnnnnnnnnnnnnnnnnnnnnnnnnnnnnnnnnnnnnnnnnnnnnnnnnnnnnnnnnnnnnnnnnnnnnnnnnnnnnnnnnnnnnnnnnnnnnnnnnnnnnnnnnnnnnnnnnnnnnnnnnnnnnnnnnnnnnnnnnnnnnnnnnnnnnnnnnnnnnnnnnnnnnnnnnnnnnnnnnnnnnnnnnnnnnnnnnnnnnnnnnnnnnnnnnnnnnnnnnnnnnnnnnnnnnnnnnnnnnnnnnnnnnnnnnnnnnnnnnnnnnnnnnnnnnnnnnnnnnnnnnnnnnnnnnnnnnnnnnnnnnnnnnnnnnnnnnnnnnnnnnnnnnnnnnnnnnnnnnnnnnnnnnnnnnnnnnnnnnnnnnnnnnnnnnnnnnnnnnnnnnnnnnnnnnnnnnnnnnnnnnnnnnnnnnnnnnnnnnnnnnnnnnnnnnnnnnnnnnnnnnnnnnnnnnnnnnnnnnnnnnnnnnnnnnnnnnnnnnnnnnnnnnnnnnnnnnnnnnnnnnnnnnnnnnnnnnnnnnnnnnnnnnnnnnnnnnnnnnnnnnnnnnnnnnnnnnnnnnnnnnnnnnnnnnnnnnnnnnnnnnnnnnnnnnnnnnnnnnnnnnnnnnnnnnnnnnnnnnnnnnnnnnnnnnnnnnnnnnnnnnnnnnnnnnnnnnnnnnnnnnnnnnnnnnnnnnnnnnnnnnnnnnnnnnnnnnnnnnnnnnnnnnnnnnnnnnnnnnnnnnnnnnnnnnnnnnnnnnnnnnnnnnnnnnnnnnnnnnnnnnnnnnnnnnnnnnnnnnnnnnnnnnnnnnnnnnnnnnnnnnnnnnnnnnnnnnnnnnnnnnnnnnnnnnnnnnnnnnnnnnnnnnnnnnnnnnnnnnnnnnnnnnnnnnnnnnnnnnnnnnnnnnnnnnnnnnnnnnnnnnnnnnnnnnnnnnnnnnnnnnnnnnnnnnnnnnnnnnnnnnnnnnnnnnnnnnnnnnnnnnnnnnnnnnnnnnnnnnnnnnnnnnnnnnnnnnnnnnnnnnnnnnnnnnnnnnnnnnnnnnnnnnnnnnnnnnnnnnnnnnnnnnnnnnnnnnnnnnnnnnnnnnnnnnnnnnnnnnnnnnnnnnnnnnnnnnnnnnnnnnnnnnnnnnnnnnnnnnnnnnnnnnnnnnnnnnnnnnnnnnnnnnnnnnnnnnnnnnnnnnnnnnnnccctaggggcccctccgagactagtaagaattagtcttagtatactattaatatattgtgttccctctataaagccctttatatcttacctggttgataggccgtatacccgcataacgtatacctttacagacttactttagtaaattatcgatagatttagaggccgatctttctatagatacaacttacgcctactatctcttagccacatttattcctcctagtaagccagagactttcgcttactttagaatggagcctgaagcctaccttagtctatacattaaaggcagggttatagtatagatatagactgactaaaagaagattattaatacccttacttaccctagactagctattaagggaattgcagctattgggcctaccttagatatttacggctaggtgatttccctagggaatcgatttattacagttctaatactaagatcaaatccagattcgcggtaagatcatactcttcggcttacttaatataggagcaaagatgtctttcagaaaggctgaagtcttttagccttaggacaataacttataagacaaatatttaaacctacttagccttaagagtaagactaaatctccggctccaggtacagttaaaccagtattccacgctagagtcgccgtcgatacacagattaatgttcttatcaccctataagccagtattagtatcaagattagtggcagcaagattattaccggcaagaccttgatagatacttagctaagtagctatataaacactgacctctccttctaggcttatagtaactacgatacgtctaataataccttctactactaatttagggcctatctgtactataatatttgtcagaatctaggatgaatactgtcatttttcatccctgatacagttggatcacgtgactnnnnnnnnnnnnnnnnnnnnnnnnnnnnnnnnnnnnnnnnnnnnnnnnnnnnnnnnnnnnnnnnnnnnnnnnnnnnnnnnnnnnnnnnnnnnnnnnnnnnnnnnnnnnnnnnnnnnnnnnnnnnnnnnnnnnnnnnnnnnnnnnnnnnnnnnnnnnnnnnnnnnnnnnnnnnnnnnnnnnnnnnnnnnnnnnnnnnnnnnnnnnnnnnnnnnnnnnnnnnnnnnnnnnnnnnnnnnnnnnnnnnnnnnnnnnnnnnnnnnnnnnnnnnnnnnnnnnnnnnnnnnnnnnnnnnnnnnnnnnnnnnnnnnnnnnnnnnnnnnnnnnnnnnnnnnnnnnnnnnnnnnnnnnnnnnnnnnnnnnnnnnnnnnnnnnnnnnnnnnnnnnnnnnnnnnnnnnnnnnnnnnnnnnnnnnnnnnnnnnnnnnnnnnnnnnnnnnnnnnnnnnnnnnnnnnnnnnnnnnnnnnnnnnnnnnnnnnnnnnnnnnnnnnnnnnnnnnnnnnnnnnnnnnnnnnnnnnnnnnnnnnnnnnnnnnnnnnnnnnnnnnnnnnnnnnnnnnnnnnnnnnnnnnnnnnnnnnnnnnnnnnnnnnnnnnnnnnnnnnnnnnnnnnnnnnnnnnnnnnnnnnnnnnnnnnnnnnnnnnnnnnnnnnnnnnnnnnnnnnnnnnnnnnnnnnnnnnnnnnnnnnnnnnnnnnnnnnnnnnnnnnnnnnnnnnnnnnnnnnnnnnnnnnnnnnnnnnnnnnnnnnnnnnnnnnnnnnnnnnnnnnnnnnnnnnnnnnnnnnnnnnnnnnnnnnnnnnnnnnnnnnnnnnnnnnnnnnnnnnnnnnnnnnnnnnnnnnnnnnnnnnnnnnnnnnnnnnnnnnnnnnnnnnnnnnnnnnnnnnnnnnnnnnnnnnnnnnnnnnnnnnnnnnnnnnnnnnnnnnnnnnnnnnnnnnnnnnnnnnnnnnnnnnnnnnnnnnnnnnnnnnnnnnnnnnnnnnnnnnnnnnnnnnnnnnnnnnnnnnnnnnnnnnnnnnnnnnnnnnnnnnnnnnnnnnnnnnnnnnnnnnnnnnnnnnnnnnnnnnnnnnnnnnnnnnnnnnnnnnnnnnnnnnnnnnnnnnnnnnnnnnnnnnnnnnnnnnnnnnnnnnnnnnnnnnnnnnnnnnnnnnnnnnnnnnnnnnnnnnnnnnnnnnnnnnnnnnnnnnnnnnnnnnnnnnnnnnnnnnnnnnnnnnnnnnnnnnnnnnnnnnnnnnnnnnnnnnnnnnnnnnnnnnnnnnnnnnnnnnnnnnnnnnnnnnnnnnnnnnnnnnnnnnnnnnnnnnnnnnnnnnnnnnnnnnnnnnnnnnnnnnnnnnnnnnnnnnnnnnnnnnnnnnnnnnnnnnnnnnnnnnnnnnnnnnnnnnnnnnnnnnnnnnnnnnnnnnnnnnnnnnnnnnnnnnnnnnnnnnnnnnnnnnnnnnnnnnnnnnnnnnnnnnnnnnnnnnnnnnnnnnnnnnnnnnnnnnnnnnnnnnnnnnnnnnnnnnnnnnnnnnnnnnnnnnnnnnnnnnnnnnnnnnnnnnnnnnnnnnnnnnnnnnnnnnnnnnnnnnnnnnnnnnnnnnnnnnnnnnnnnnnnnnnnnnnnnnnnnnnnnnnnnnnnnnnnnnnnnnnnnnnnnnnnnnnnnnnnnnnnnnnnnnnnnnnnnnnnnnnnnnnnnnnnnnnnnnnnnnnnnnnnnnnnnnnnnnnnnnnnnnnnnnnnnnnnnnnnnnnnnnnnnnnnnnnnnnnnnnnnnnnnnnnnnnnnnnnnnnnnnnnnnnnnnnnnnnnnnnnnnnnnnnnnnnnnnnnnnnnnnnnnnnnnnnnnnnnnnnnnnnnnnnnnnnnnnnnnnnnnnnnnnnnnnnnnnnnnnnnnnnnnnnnnnnnnnnnnnnnnnnnnnnnnnnnnnnnnnnnnnnnnnnnnnnnnnnnnnnnnnnnnnnnnnnnnnnnnnnnnnnnnnnnnnnnnnnnnnnnnnnnnnnnnnnnnnnnnnnnnnnnnnnnnnnnnnnnnnnnnnnnnnnnnnnnnnnnnnnnnnnnnnnnnnnnnnnnnnnnnnnnnnnnnnnnnnnnnnnnnnnnnnnnnnnnnnnnnnnnnnnnnnnnnnnnnnnnnnnnnnnnnnnnnnnnnnnnnnnnnnnnnnnnnnnnnnnnnnnnnnnnnnnnnnnnnnnnnnnnnnnnnnnnnnnnnnnnnnnnnnnnnnnnnnnnnnnnnnnnnnnnnnnnnnnnnnnnnnnnnnnnnnnnnnnnnnnnnnnnnnnnnnnnnnnnnnnnnnnnnnnnnnnnnnnnnnnnnnnnnnnnnnnnnnnnnnnnnnnnnnnnnnnnnnnnnnnnnnnnnnnnnnnnnnnnnnnnnnnnnnnnnnnnnnnnnnnnnnnnnnnnnnnnnnnnnnnnnnnnnnnnnnnnnnnnnnnnnnnnnnnnnnnnnnnnnnnnnnnnnnnnnnnnnnnnnnnnnnnnnnnnnnnnnnnnnnnnnnnnnnnnnnnnnnnnnnnnnnnnnnnnnnnnnnnnnnnnnnnnnnnnnnnnnnnnnnnnnnnnnnnnnnnnnnnnnnnnnnnnnnnnnnnnnnnnnnnnnnnnnnnnnnnnnnnnnnnnnnnnnnnnnnnnnnnnnnnnnnnnnnnnnnnnnnnnnnnnnnnnnnnnnnnnnnnnnnnnnnnnnnnnnnnnnnnnnnnnnnnnnnnnnnnnnnnnnnnnnnnnnnnnnnnnnnnnnnnnnnnnnnnnnnnnnnnnnnnnnnnnnnnnnnnnnnnnnnnnnnnnnnnnnnnnnnnnnnnnnnnnnnnnnnnnnnnnnnnnnnnnnnnnnnnnnnnnnnnnnnnnnnnnnnnnnnnnnnnnnnnnnnnnnnnnnnnnnnnnnnnnnnnnnnnnnnnnnnnnnnnnnnnnnnnnnnnnnnnnnnnnnnnnnnnnnnnnnnnnnnnnnnnnnnnnnnnnnnnnnnnnnnnnnnnnnnnnnnnnnnnnnnnnnnnnnnnnnnnnnnnnnnnnnnnnnnnnnnnnnnnnnnnnnnnnnnnnnnnnnnnnnnnnnnnnnnnnnnnnnnnnnnnnnnnnnnnnnnnnnnnnnnnnnnnnnnnnnnnnnnnnnnnnnnnnnnnnnnnnnnnnnnnnnnnnnnnnnnnnnnnnnnnnnnnnnnnnnnnnnnnnnnnnnnnnnnnnnnnnnnnnnnnnnnnnnnnnnnnnnnnnnnnnnnnnnnnnnnnnnnnnnnnnnnnnnnnnnnnnnnnnnnnnnnnnnnnnnnnnnnnnnnnnnnnnnnnnnnnnnnnnnnnnnnnnnnnnnnnnnnnnnnnnnnnnnnnnnnnnnnnnnnnnnnnnnnnnnnnnnnnnnnnnnnnnnnnnnnnnnnnnnnnnnnnnnnnnnnnnnnnnnnnnnnnnnnnnnnnnnnnnnnnnnnnnnnnnnnnnnnnnnnnnnnnnnnnnnnnnnnnnnnnnnnnnnnnnnnnnnnnnnnnnnnnnnnnnnnnnnnnnnnnnnnnnnnnnnnnnnnnnnnnnnnnnnnnnnnnnnnnnnnnnnnnnnnnnnnnnnnnnnnnnnnnnnnnnnnnnnnnnnnnnnnnnnnnnnnnnnnnnnnnnnnnnnnnnnnnnnnnnnnnnnnnnnnnnnnnnnnnnnnnnnnnnnnnnnnnnnnnnnnnnnnnnnnnnnnnnnnnnnnnnnnnnnnnnnnnnnnnnnnnnnnnnnnnnnnnnnnnnnnnnnnnnnnnnnnnnnnnnnnnnnnnnnnnnnnnnnnnnnnnnnnnnnnnnnnnnnnnnnnnnnnnnnnnnnnnnnnnnnnnnnnnnnnnnnnnnnnnnnnnnnnnnnnnnnnnnnnnnnnnnnnnnnnnnnnnnnnnnnnnnnnnnnnnnnnnnnnnnnnnnnnnnnnnnnnnnnnnnnnnnnnnnnnnnnnnnnnnnnnnnnnnnnnnnnnnnnnnnnnnnnnnnnnnnnnnnnnnnnnnnnnnnnnnnnnnnnnnnnnnnnnnnnnnnnnnnnnnnnnnnnnnnnnnnnnnnnnnnnnnnnnnnnnnnnnnnnnnnnnnnnnnnnnnnnnnnnnnnnnnnnnnnnnnnnnnnnnnnnnnnnnnnnnnnnnnnnnnnnnnnnnnnnnnnnnnnnnnnnnnnnnnnnnnnnnnnnnnnnnnnnnnnnnnnnnnnnnnnnnnnnnnnnnnnnnnnnnnnnnnnnnnnnnnnnnnnnnnnnnnnnnnnnnnnnnnnnnnnnnnnnnnnnnnnnnnnnnnnnnnnnnnnnnnnnnnnnnnnnnnnnnnnnnnnnnnnnnnnnnnnnnnnnnnnnnnnnnnnnnnnnnnnnnnnnnnnnnnnnnnnnnnnnnnnnnnnnnnnnnnnnnnnnnnnnnnnnnnnnnnnnnnnnnnnnnnnnnnnnnnnnnnnnnnnnnnnnnnnnnnnnnnnnnnnnnnnnnnnnnnnnnnnnnnnnnnnnnnnnnnnnnnnnnnnnnnnnnnnnnnnnnnnnnnnnnnnnnnnnnnnnnnnnnnnnnnnnnnnnnnnnnnnnnnnnnnnnnnnnnnnnnnnnnnnnnnnnnnnnnnnnnnnnnnnnnnnnnnnnnnnnnnnnnnnnnnnnnnnnnnnnnnnnnnnnnnnnnnnnnnnnnnnnnnnnnnnnnnnnnnnnnnnnnnnnnnnnnnnnnnnnnnnnnnnnnnnnnnnnnnnnnnnnnnnnnnnnnnnnnnnnnnnnnnnnnnnnnnnnnnnnnnnnnnnnnnnnnnnnnnnnnnnnnnnnnnnnnnnnnnnnnnnnnnnnnnnnnnnnnnnnnnnnnnnnnnnnnnnnnnnnnnnnnnnnnnnnnnnnnnnnnnnnnnnnnnnnnnnnnnnnnnnnnnnnnnnnnnnnnnnnnnnnnnnnnnnnnnnnnnnnnnnnnnnnnnnnnnnnnnnnnnnnnnnnnnnnnnnnnnnnnnnnnnnnnnnnnnnnnnnnnnnnnnnnnnnnnnnnnnnnnnnnnnnnnnnnnnnnnnnnnnnnnnnnnnnnnnnnnnnnnnnnnnnnnnnnnnnnnnnnnnnnnnnnnnnnnnnnnnnnnnnnnnnnnnnnnnnnnnnnnnnnnnnnnnnnnnnnnnnnnnnnnnnnnnnnnnnnnnnnnnnnnnnnnnnnnnnnnnnnnnnnnnnnnnnnnnnnnnnnnnnnnnnnnnnnnnnnnnnnnnnnnnnnnnnnnnnnnnnnnnnnnnnnnnnnnnnnnnnnnnnnnnnnnnnnnnnnnnnnnnnnnnnnnnnnnnnnnnnnnnnnnnnnnnnnnnnnnnnnnnnnnnnnnnnnnnnnnnnnnnnnnnnnnnnnnnnnnnnnnnnnnnnnnnnnnnnnnnnnnnnnnnnnnnnnnnnnnnnnnnnnnnnnnnnnnnnnnnnnnnnnnnnnnnnnnnnnnnnnnnnnnnnnnnnnnnnnnnnnnnnnnnnnnnnnnnnnnnnnnnnnnnnnnnnnnnnnnnnnnnnnnnnnnnnnnnnnnnnnnnnnnnnnnnnnnnnnnnnnnnnnnnnnnnnnnnnnnnnnnnnnnnnnnnnnnnnnnnnnnnnnnnnnnnnnnnnnnnnnnnnnnnnnnnnnnnnnnnnnnnnnnnnnnnnnnnnnnnnnnnnnnnnnnnnnnnnnnnnnnnnnnnnnnnnnnnnnnnnnnnnnnnnnnnnnnnnnnnnnnnnnnnnnnnnnnnnnnnnnnnnnnnnnnnnnnnnnnnnnnnnnnnnnnnnnnnnnnnnnnnnnnnnnnnnnnnnnnnnnnnnnnnnnnnnnnnnnnnnnnnnnnnnnnnnnnnnnnnnnnnnnnnnnnnnnnnnnnnnnnnnnnnnnnnnnnnnnnnnnnnnnnnnnnnnnnnnnnnnnnnnnnnnnnnnnnnnnnnnnnnnnnnnnnnnnnnnnnnnnnnnnnnnnnnnnnnnnnnnnnnnnnnnnnnnnnnnnnnnnnnnnnnnnnnnnnnnnnnnnnnnnnnnnnnnnnnnnnnnnnnnnnnnnnnnnnnnnnnnnnnnnnnnnnnnnnnnnnnnnnnnnnnnnnnnnnnnnnnnnnnnnnnnttgttttgtttgttttgattactaagttgtccatcagattgtcatgttttaggactattgtcagttttagagagttagagaatttattaagatttttctgccacaaaatacactcgccttaccaccgtttttccgtcaatattagatataaggctctagctaagattctcagctttattaactaggcaacaggtaatcgtaaggcatatttacctgataaaatgctcaaattatacgaaaagactggtaccattccgatattagaatctaatatagggaagcgaggcctttctatagaagccgatacttaagagtatgaaattacagtagacctatctaaaaatagcacaatatctatcttagaaacagctgccgatatatttcgccgagctaatattacaactttaggtacaaaatctgtgacaagtgtattaatcagtatcagaaactaactagttacctagaccctaaaacccccaagttcataaaacagggccattatccagccggagctagtagcttctagctaccagaattgcgatataagtttagaagttttcgtcgaatgtaacattttcttttgtagactgactaagcatgtattaacagtcaattgcggcttttttggtccgtaccaggccataaatgagatccttgataccgacggagatcttcaggaaaggctgacatatgatatgcccggcctctgtgacaatatcgttaatcttacgccattacgcttaaagttcacattctcctaggacagggtaacagctagacgcaactcagtttacccgagaaagacagtcggtggctagagtgtaacaaaatgttcggcaccaactgctgagcttaataaggcagttaggcgaaggggcttgagcctccagtgtgatgaatttccctgggggtctagtgagcagggaggagaatggctgcctgcgagtcagcgtcgtacggagtgtgtcaccagcttccagaatgcatggcacggaaattgcgtccgtaagtgcttaattctttttcatctataattgggttgttctggattctgtgggaaacttgctaataaatttttagaattggttggacaactttcatcgaactggaaacaactggaccctgagtcccggaaagattccaagaagatagattattgggcatcatggcagaaacgaaccggtaagcttatattctatttcttcgcaattgggctatctaacactatgtctttttgcgttagactggacccacgcgggcaagtatgggatagggcaaaacataccatatgaacaaaaactcattgaatacggcgaagaaatgcctcctccagatggtggggaccaggtatgtattcaatttcaggatttaggaatttacctaacaaagcggtgacagggagataacaagaagctatcgtgggcttttaaacgggactatgagacttcctggcttaaccctcaaacaccactcacgtccgcagactggtggaatgccaaccaaccgacatggtacaaacccaaatacaatgggcctcttaccatggactcggttctttgcgcggtcaatcattttaatcagggcaacgtgtataaactacctggtgtgaaagtcaagtcagatggaacaccaatcggcgtgcaaaaagagtacaacgcatattgcaaaagaaccaaccagggtggtatggccccccctgcttggggcgtcgattttaccatgggaagatgtctcattcgtttccaaaacagcgcaagcagcagctcgggcacatctaaacgggacgctcagaagtggggtgaatgggaagttgaaagtatgtggacgccgaacgatgtctactcaagcgcttgctgattctccttttaggcattgaatatgtggaggatgtggacgatgccgagatggctcagttattgaagcctgcggatctggatggttctgaacatgaaaggtaacttgccttgaatgtcgatgaattttttattttttatttctttggcggagcagacagccatttgcaagacgccggaaaacggactctcctgttggagcgaattccgaagtgtctggcaactttttcaccttttagttcaccctatctagtgtatatgcaacaccacgttcttcatttcatctattgattagggtctgcaagttcttcttccgtcaattgatacagttccctccctaattctgcactggctcgatacttttccccaacagtagagccctcaaggaattcgttggtttccatccatgtaccaatcacaccaaagagatcgtgaatctcaggatccatacgaccttcgcgaatgacgtttcggaaaccatctaaataaagcacatacaaacttccagaccggaaagcctcctcgtccgcaaggataagatacgtcctcgtggcgcatttttgtaaccctatcgcgaggctatcgatgattgtgtctcggtcatcgcgccaagcctccggggcttcttcttttgcttcggcaatttgcgttttgagatcagagcggaaagtttcaaggtcttctgctttacgggcgcgcggaatcctcattctatcatcgacctcgggttcaagtgggcccgcaagttcgggaagaatctcgtacacacgccgccactccgatccgaagttgaagagatccgcattattgagaaccgcccaccaggcttctgattcaaagggatctgaatcgacccattcagacattaaatcatcgtgtctggctttctcttcttcgtcggtgcaatagtgcgtgcgtagtaaagcgggacaagtctggtcattgaaaagattcattgcgtgccatcgaagcacgtcgctgcggtaaggtcggagaattgtgtccacctcctctgttgtaggcgcacgtggcggatcgatacccgctggaaggctatcccaatcttcggcccattcaaggggaataaattccatgtcgaggaactcagtgaccaacatttttcgttgctagtcgggggttttggtggaggagttattccagtttatctgcacaggattagcatctgaagtagaaacaaaaaggcacaacatacgataagatattgttcgacagccagtgtaccccatggaggaggaggcaaagaatccatgtcattcatcacgaggaaaggttaggaagcttaaagagaagataaaaggggaagatgcggaagagacaccggggaggggtgtggagagcggggctgatatggtgaggaacgcacaaatcattcctttaacctataatcctttgatacacacaagtgaatattaactacatgctcttactaactataacttagttaataccttgcctaaaagatggaaaacacaggtttaaagaggtagtgaatatcgcttttttcttatactcagcccgaagcaatcaccacccggcatttcgctggcacataccgcgcctaacctaaagtggctagaaatagcacgtgacagacacatcttacgggacttgaacggtccgtttgagctcttatggaccatacacggttaacaggcccagctttgaaaatgtggagagaatccgaggtctacattatacaatgcaacgatgacttcacctagtgcgttatatacctcccgcgtatgatagtagcaaacattcacattctccttcaaccctaattatgcgtatgtatcagctaggaacggaatagggaagaagatcggactagtcttatacactattgagcccaagactcatcacattttcgcagaggaaccgctatgcatgccagactaataggattccctcggctggcggcgagtaaatacagccatcttacagggggggggtgtatgtgtgtgaaatcatttaccctgagccctcgcgaacgatatgcagataccactactatatatatccgtgtacgtacatgtagagtgttccacttcctgaaaacgaacctagagcctcatcaaggcctggcgtggcttaattgcccttcccattattaggttgccccggtggcgcgcgactccgaaaccgttgtgacgcctcggcaaagtccagcacggccttgaccgtcctggctcgcgagacggtgtccggtttacctttctcaccttgttttgagcctcccagcaggctcgacacactattaagcgcatctccaacttctctcctcagctctctccgcggttccctcaagtttgggcaatccaccatcgcatgggtgactgtttcttgtgcgccgcatgcgcactggtcgtcgtcactataaatcaggatctcccgccccgggtacagttgagccagtgttccacgctggagtcgccatcgatgcacagattgatgttctcattgacccacaagccagcgttggtatcaagattggtggcggcaagattgttgcgggtaaaaccttgatggatgctcagctgagtggctatgtgaacaccgacgtctccttccaggctcatggtgactacgacacatctgacaatgcattccactaccgatttggggcatatctgtactataacattggttataaggcagtggccaagatcttagacttcgttgactgggcaacaggagatcgcacgtgaatcattagcgtatagatggtgcctattccattggcannnnnnnnnnnnnnnnnnnnnnnnnnnnnnnnnnnnnnnnnnnnnnnnnnnnnnnnnnnnnnnnnnnnnnnnnnnnnnnnnnnnnnnnnnnnnnnnnnnnnnnnnnnnnnnnnnnnnnnnnnnnnnnnnnnnnnnnnnnnnnnnnnnnnnnnnnnnnnnnnnnnnnnnnnnnnnnnnnnnnnnnnnnnnnnnnnnnnnnnnnnnnnnnnnnnnnnnnnnnnnnnnnnnnnnnnnnnnnnnnnnnnnnnnnnnnnnnnnnnnnnnnnnnnnnnnnnnnnnnnnnnnnnnnnnnnnnnnnnnnnnnnnnnnnnnnnnnnnnnnnnnnnnnnnnnnnnnnnnnnnnnnnnnnnnnnnnnnnnnnnnnnnnnnnnnnnnnnnnnnnnnnnnnnnnnnnnnnnnnnnnnnnnnnnnnnnnnnnnnnnnnnnnnnnnnnnnnnnnnnnnnnnnnnnnnnnnnnnnnnnnnnnnnnnnnnnnnnnnnnnnnnnnnnnnnnnnnnnnnnnnnnnnnnnnnnnnnnnnnnnnnnnnnnnnnnnnnnnnnnnnnnnnnnnnnnnnnnnnnnnnnnnnnnnnnnnnnnnnnnnnnnnnnnnnnnnnnnnnnnnnnnnnnnnnnnnnnnnnnnnnnnnnnnnnnnnnnnnnnnnnnnnnnnnnnnnnnnnnnnnnnnnnnnnnnnnnnnnnnnnnnnnnnnnnnnnnnnnnnnnnnnnnnnnnnnnnnnnnnnnnnnnnnnnnnnnnnnnnnnnnnnnnnnnnnnnnnnnnnnnnnnnnnnnnnnnnnnnnnnnnnnnnnnnnnnnnnnnnnnnnnnnnnnnnnnnnnnnnnnnnnnnnnnnnnnnnnnnnnnnnnnnnnnnnnnnnnnnnnnnnnnnnnnnnnnnnnnnnnnnnnnnnnnnnnnnnnnnnnnnnnnnnnnnnnnnnnnnnnnnnnnnnnnnnnnnnnnnnnnnnnnnnnnnnnnnnnnnnnnnnnnnnnnnnnnnnnnnnnnnnnnnnnnnnnnnnnnnnnnnnnnnnnnnnnnnnnnnnnnnnnnnnnnnnnnnnnnnnnnnnnnnnnnnnnnnnnnnnnnnnnnnnnnnnnnnnnnnnnnnnnnnnnnnnnnnnnnnnnnnnnnnnnnnnnnnnnnnnnnnnnnnnnnnnnnnnnnnnnnnnnnnnnnnnnnnnnnnnnnnnnnnnnnnnnnnnnnnnnnnnnnnnnnnnnnnnnnnnnnnnnnnnnnnnnnnnnnnnnnnnnnnnnnnnnnnnnnnnnnnnnnnnnnnnnnnnnnnnnnnnnnnnnnnnnnnnnnnnnnnnnnnnnnnnnnnnnnnnnnnnnnnnnnnnnnnnnnnnnnnnnnnnnnnnnnnnnnnnnnnnnnnnnnnnnnnnnnnnnnnnnnnnnnnnnnnnnnnnnnnnnnnnnnnnnnnnnnnnnnnnnnnnnnnnnnnnnnnnnnnnnnnnnnnnnnnnnnnnnnnnnnnnnnnnnnnnnnnnnnnnnnnnnnnnnnnnnnnnnnnnnnnnnnnnnnnnnnnnnnnnnnnnnnnnnnnnnnnnnnnnnnnnnnnnnnnnnnnnnnnnnnnnnnnnnnnnnnnnnnnnnnnnnnnnnnnnnnnnnnnnnnnnnnnnnnnnnnnnnnnnnnnnnnnnnnnnnnnnnnnnnnnnnnnnnnnnnnnnnnnnnnnnnnnnnnnnnnnnnnnnnnnnnnnnnnnnnnnnnnnnnnnnnnnnnnnnnnnnnnnnnnnnnnnnnnnnnnnnnnnnnnnnnnnnnnnnnnnnnnnnnnnnnnnnnnnnnnnnnnnnnnnnnnnnnnnnnnnnnnnnnnnnnnnnnnnnnnnnnnnnnnnnnnnnnnnnnnnnnnnnnnnnnnnnnnnnnnnnnnnnnnnnnnnnnnnnnnnnnnnnnnnnnnnnnnnnnnnnnnnnnnnnnnnnnnnnnnnnnnnnnnnnnnnnnnnnnnnnnnnnnnnnnnnnnnnnnnnnnnnnnnnnnnnnnnnnnnnnnnnnnnnnnnnnnnnnnnnnnnnnnnnnnnnnnnnnnnnnnnnnnnnnnnnnnnnnnnnnnnnnnnnnnnnnnnnnnnnnnnnnnnnnnnnnnnnnnnnnnnnnnnnnnnnnnnnnnnnnnnnnnnnnnnnnnnnnnnnnnnnnnnnnnnnnnnnnnnnnnnnnnnnnnnnnnnnnnnnnnnnnnnnnnnnnnnnnnnnnnnnnnnnnnnnnnnnnnnnnnnnnnnnnnnnnnnnnnnnnnnnnnnnnnnnnnnnnnnnnnnnnnnnnnnnnnnnnnnnnnnnnnnnnnnnnnnnnnnnnnnnnnnnnnnnnnnnnnnnnnnnnnnnnnnnnnnnnnnnnnnnnnnnnnnnnnnnnnnnnnnnnnnnnnnnnnnnnnnnnnnnnnnnnnnnnnnnnnnnnnnnnnnnnnnnnnnnnnnnnnnnnnnnnnnnnnnnnnnnnnnnnnnnnnnnnnnnnnnnnnnnnnnnnnnnnnnnnnnnnnnnnnnnnnnnnnnnnnnnnnnnnnnnnnnnnnnnnnnnnnnnnnnnnnnnnnnnnnnnnnnnnnnnnnnnnnnnnnnnnnnnnnnnnnnnnnnnnnnnnnnnnnnnnnnnnnnnnnnnnnnnnnnnnnnnnnnnnnnnnnnnnnnnnnnnnnnnnnnnnnnnnnnnnnnnnnnnnnnnnnnnnnnnnnnnnnnnnnnnnnnnnnnnnnnnnnnnnnnnnnnnnnnnnnnnnnnnnnnnnnnnnnnnnnnnnnnnnnnnnnnnnnnnnnnnnnnnnnnnnnnnnnnnnnnnnnnnnnnnnnnnnnnnnnnnnnnnnnnnnnnnnnnnnnnnnnnnnnnnnnnnnnnnnnnnnnnnnnnnnnnnnnnnnnnnnnnnnnnnnnnnnnnnnnnnnnnnnnnnnnnnnnnnnnnnnnnnnnnnnnnnnnnnnnnnnnnnnnnnnnnnnnnnnnnnnnnnnnnnnnnnnnnnnnnnnnnnnnnnnnnnnnnnnnnnnnnnnnnnnnnnnnnnnnnnnnnnnnnnnnnnnnnnnnnnnnnnnnnnnnnnnnnnnnnnnnnnnnnnnnnnnnnnnnnnnnnnnnnnnnnnnnnnnnnnnnnnnnnnnnnnnnnnnnnnnnnnnnnnnnnnnnnnnnnnnnnnnnnnnnnnnnnnnnnnnnnnnnnnnnnnnnnnnnnnnnnnnnnnnnnnnnnnnnnnnnnnnnnnnnnnnnnnnnnnnnnnnnnnnnnnnnnnnnnnnnnnnnnnnnnnnnnnnnnnnnnnnnnnnnnnnnnnnnnnnnnnnnnnnnnnnnnnnnnnnnnnnnnnnnnnnnnnnnnnnnnnnnnnnnnnnnnnnnnnnnnnnnnnnnnnnnnnnnnnnnnnnnnnnnnnnnnnnnnnnnnnnnnnnnnnnnnnnnnnnnnnnnnnnnnnnnnnnnnnnnnnnnnnnnnnnnnnnnnnnnnnnnnnnnnnnnnnnnnnnnnnnnnnnnnnnnnnnnnnnnnnnnnnnnnnnnnnnnnnnnnnnnnnnnnnnnnnnnnnnnnnnnnnnnnnnnnnnnnnnnnnnnnnnnnnnnnnnnnnnnnnnnnnnnnnnnnnnnnnnnnnnnnnnnnnnnnnnnnnnnnnnnnnnnnnnnnnnnnnnnnnnnnnnnnnnnnnnnnnnnnnnnnnnnnnnnnnnnnnnnnnnnnnnnnnnnnnnnnnnnnnnnnnnnnnnnnnnnnnnnnnnnnnnnnnnnnnnnnnnnnnnnnnnnnnnnnnnnnnnnnnnnnnnnnnnnnnnnnnnnnnnnnnnnnnnnnnnnnnnnnnnnnnnnnnnnnnnnnnnnnnnnnnnnnnnnnnnnnnnnnnnnnnnnnnnnnnnnnnnnnnnnnnnnnnnnnnnnnnnnnnnnnnnnnnnnnnnnnnnnnnnnnnnnnnnnnnnnnnnnnnnnnnnnnnnnnnnnnnnnnnnnnnnnnnnnnnnnnnnnnnnnnnnnnnnnnnnnnnnnnnnnnnnnnnnnnnnnnnnnnnnnnnnnnnnnnnnnnnnnnnnnnnnnnnnnnnnnnnnnnnnnnnnnnnnnnnnnnnnnnnnnnnnnnnnnnnnnnnnnnnnnnnnnnnnnnnnnnnnnnnnnnnnnnnnnnnnnnnnnnnnnnnnnnnnnnnnnnnnnnnnnnnnnnnnnnnnnnnnnnnnnnnnnnnnnnnnnnnnnnnnnnnnnnnnnnnnnnnnnnnnnnnnnnnnnnnnnnnnnnnnnnnnnnnnnnnnnnnnnnnnnnnnnnnnnnnnnnnnnnnnnnnnnnnnnnnnnnnnnnnnnnnnnnnnnnnnnnnnnnnnnnnnnnnnnnnnnnnnnnnnnnnnnnnnnnnnnnnnnnnnnnnnnnnnnnnnnnnnnnnnnnnnnnnnnnnnnnnnnnnnnnnnnnnnnnnnnnnnnnnnnnnnnnnnnnnnnnnnnnnnnnnnnnnnnnnnnnnnnnnnnnnnnnnnnnnnnnnnnnnnnnnnnnnnnnnnnnnnnnnnnnnnnnnnnnnnnnnnnnnnnnnnnnnnnnnnnnnnnnnnnnnnnnnnnnnnnnnnnnnnnnnnnnnnnnnnnnnnnnnnnnnnnnnnnnnnnnnnnnnnnnnnnnnnnnnnnnnnnnnnnnnnnnnnnnnnnnnnnnnnnnnnnnnnnnnnnnnnnnnnnnnnnnnnnnnnnnnnnnnnnnnnnnnnnnnnnnnnnnnnnnnnnnnnnnnnnnnnnnnnnnnnnnnnnnnnnnnnnnnnnnnnnnnnnnnnnnnnnnnnnnnnnnnnnnnnnnnnnnnnnnnnnnnnnnnnnnnnnnnnnnnnnnnnnnnnnnnnnnnnnnnnnnnnnnnnnnnnnnnnnnnnnnnnnnnnnnnnnnnnnnnnnnnnnnnnnnnnnnnnnnnnnnnnnnnnnnnnnnnnnnnnnnnnnnnnnnnnnnnnnnnnnnnnnnnnnnnnnnnnnnnnnnnnnnnnnnnnnnnnnnnnnnnnnnnnnnnnnnnnnnnnnnnnnnnnnnnnnnnnnnnnnnnnnnnnnnnnnnnnnnnnnnnnnnnnnnnnnnnnnnnnnnnnnnnnnnnnnnnnnnnnnnnnnnnnnnnnnnnnnnnnnnnnnnnnnnnnnnnnnnnnnnnnnnnnnnnnnnnnnnnnnnnnnnnnnnnnnnnnnnnnnnnnnnnnnnnnnnnnnnnnnnnnnnnnnnnnnnnnnnnnnnnnnnnnnnnnnnnnnnnnnnnnnnnnnnnnnnnnnnnnnnnnnnnnnnnnnnnnnnnnnnnnnnnnnnnnnnnnnnnnnnnnnnnnnnnnnnnnnnnnnnnnnnnnnnnnnnnnnnnnnnnnnnnnnnnnnnnnnnnnnnnnnnnnnnnnnnnnnnnnnnnnnnnnnnnnnnnnnnnnnnnnnnnnnnnnnnnnnnnnnnnnnnnnnnnnnnnnnnnnnnnnnnnnnnnnnnnnnnnnnnnnnnnnnnnnnnnnnnnnnnnnnnnnnnnnnnnnnnnnnnnnnnnnnnnnnnnnnnnnnnnnnnnnnnnnnnnnnnnnnnnnnnnnnnnnnnnnnnnnnnnnnnnnnnnnnnnnnnnnnnnnnnnnnnnnnnnnnnnnnnnnnnnnnnnnnnnnnnnnnnnnnnnnnnnnnnnnnnnnnnnnnnnnnnnnnnnnnnnnnnnnnnnnnnnnnnnnnnnnnnnnnnnnnnnnnnnnnnnnnnnnnnnnnnnnnnnnnnnnnnnnnnnnnnnnnnnnnnnnnnnnnnnnnnnnnnnnnnnnnnnnnnnnnnnnnnnnnnnnnnnnnnnnnnnnnnnnnnnnnnnnnnnnnnnnnnnnnnnnnnnnnnnnnnnnnnnnnnnnnnnnnnnnnnnnnnnnnnnnnnnnnnnnnnnnnnnnnnnnnnnnnnnnnnnnnnnnnnnnnnnnnnnnnnnnnnnnnnnnnnnnnnnnnnnnnnnnnnnnnnnnnnnnnnnnnnnnnnnnnnnnnnnnnnnnnnnnnnnnnnnnnnnnnnnnnnnnnnnnnnnnnnnnnnnnnnnnnnnnnnnnnnnnnnnnnnnnnnnnnnnnnnnnnnnnnnnnnnnnnnnnnnnnnnnnnnnnnnnnnnnnnnnnnnnnnnnnnnnnnnnnnnnnnnnnnnnnnnnnnnnnnnnnnnnnnnnnnnnnnnnnnnnnnnnnnnnnnnnnnnnnnnnnnnnnnnnnnnnnnnnnnnnnnnnnnnnnnnnnnnnnnnnnnnnnnnnnnnnnnnnnnnnnnnnnnnnnnnnnnnnnnnnnnnnnnnnnnnnnnnnnnnnnnnnnnnnnnnnnnnnnnnnnnnnnnnnnnnnnnnnnnnnnnnnnnnnnnnnnnnnnnnnnnnnnnnnnnnnnnnnnnnnnnnnnnnnnnnnnnnnnnnnnnnnnnnnnnnnnnnnnnnnnnnnnnnnnnnnnnnnnnnnnnnnnnnnnnnnnnnnnnnnnnnnnnnnnnnnnnnnnnnnnnnnnnnnnnnnnnnnnnnnnnnnnnnnnnnnnnnnnnnnnnnnnnnnnnnnnnnnnnnnnnnnnnnnnnnnnnnnnnnnnnnnnnnnnnnnnnnnnnnnnnnnnnnnnnnnnnnnnnnnnnnnnnnnnnnnnnnnnnnnnnnnnnnnnnnnnnnnnnnnnnnnnnnnnnnnnnnnnnnnnnnnnnnnnnnnnnnnnnnnnnnnnnnnnnnnnnnnnnnnnnnnnnnnnnnnnnnnnnnnnnnnnnnnnnnnnnnnnnnnnnnnnnnnnnnnnnnnnnnnnnnnnnnnnnnnnnnnnnnnnnnnnnnnnnnnnnnnnnnnnnnnnnnnnnnnnnnnnnnnnnnnnnnnnnnnnnnnnnnnnnnnnnnnnnnnnnnnnnnnnnnnnnnnnnnnnnnnnnnnnnnnnnnnnnnnnnnnnnnnnnnnnnnnnnnnnnnnnnnnnnnnnnnnnnnnnnnnnnnnnnnnnnnnnnnnnnnnnnnnnnnnnnnnnnnnnnnnnnnnnnnnnnnnnnnnnnnnnnnnnnnnnnnnnnnnnnnnnnnnnnnnnnnnnnnnnnnnnnnnnnnnnnnnnnnnnnnnnnnnnnnnnnnnnnnnnnnnnnnnnnnnnnnnnnnnnnnnnnnnnnnnnnnnnnnnnnnnnnnnnnnnnnnnnnnnnnnnnnnnnnnnnnnnnnnnnnnnnnnnnnnnnnnnnnnnnnnnnnnnnnnnnnnnnnnnnnnnnnnnnnnnnnnnnnnnnnnnnnnnnnnnnnnnnnnnnnnnnnnnnnnnnnnnnnnnnnnnnnnnnnnnnnnnnnnnnnnnnnnnnnnnnnnnnnnnnnnnnnnnnnnnnnnnnnnnnnnnnnnnnnnnnnnnnnnnnnnnnnnnnnnnnnnnnnnnnnnnnnnnnnnnnnnnnnnnnnnnnnnnnnnnnnnnnnnnnnnnnnnnnnnnnnnnnnnnnnnnnnnnnnnnnnnnnnnnnnnnnnnnnnnnnnnnnnnnnnnnnnnnnnnnnnnnnnnnnnnnnnnnnnnnnnnnnnnnnnnnnnnnnnnnnnnnnnnnnnnnnnnnnnnnnnnnnnnnnnnnnnnnnnnnnnnnnnnnnnnnnnnnnnnnnnnnnnnnnnnnnnnnnnnnnnnnnnnnnnnnnnnnnnnnnnnnnnnnnnnnnnnnnnnnnnnnnnnnnnnnnnnnnnnnnnnnnnnnnnnnnnnnnnnnnnnnnnnnnnnnnnnnnnnnnnnnnnnnnnnnnnnnnnnnnnnnnnnnnnnnnnnnnnnnnnnnnnnnnnnnnnnnnnnnnnnnnnnnnnnnnnnnnnnnnnnnnnnnnnnnnnnnnnnnnnnnnnnnnnnnnnnnnnnnnnnnnnnnnnnnnnnnnnnnnnnnnnnnnnnnnnnnnnnnnnnnnnnnnnnnnnnnnnnnnnnnnnnnnnnnnnnnnnnnnnnnnnnnnnnnnnnnnnnnnnnnnnnnnnnnnnnnnnnnnnnnnnnnnnnnnnnnnnnnnnnnnnnnnnnnnnnnnnnnnnnnnnnnnnnnnnnnnnnnnnnnnnnnnnnnnnnnnnnnnnnnnnnnnnnnnnnnnnnnnnnnnnnnnnnnnnnnnnnnnnnnnnnnnnnnnnnnnnnnnnnnnnnnnnnnnnnnnnnnnnnnnnnnnnnnnnnnnnnnnnnnnnnnnnnnnnnnnnnnnnnnnnnnnnnnnnnnnnnnnnnnnnnnnnnnnnnnnnnnnnnnnnnnnnnnnnnnnnnnnnnnnnnnnnnnnnnnnnnnnnnnnnnnnnnnnnnnnnnnnnnnnnnnnnnnnnnnnnnnnnnnnnnnnnnnnnnnnnnnnnnnnnnnnnnnnnnnnnnnnnnnnnnnnnnnnnnnnnnnnnnnnnnnnnnnnnnnnnnnnnnnnnnnnnnnnnnnnnnnnnnnnnnnnnnnnnnnnnnnnnnnnnnnnnnnnnnnnnnnnnnnnnnnnnnnnnnnnnnnnnnnnnnnnnnnnnnnnnnnnnnnnnnnnnnnnnnnnnnnnnnnnnnnnnnnnnnnnnnnnnnnnnnnnnnnnnnnnnnnnnnnnnnnnnnnnnnnnnnnnnnnnnnnnnnnnnnnnnnnnnnnnnnnnnnnnnnnnnnnnnnnnnnnnnnnnnnnnnnnnnnnnnnnnnnnnnnnnnnnnnnnnnnnnnnnnnnnnnnnnnnnnnnnnnnnnnnnnnnnnnnnnnnnnnnnnnnnnnnnnnnnnnnnnnnnnnnnnnnnnnnnnnnnnnnnnnnnnnnnnnnnnnnnnnnnnnnnnnnnnnnnnnnnnnnnnnnnnnnnnnnnnnnnnnnnnnnnnnnnnnnnnnnnnnnnnnnnnnnnnnnnnnnnnnnnnnnnnnnnnnnnnnnnnnnnnnnnnnnnnnnnnnnnnnnnnnnnnnnnnnnnnnnnnnnnnnnnnnnnnnnnnnnnnnnnnnnnnnnnnnnnnnnnnnnnnnnnnnnnnnnnnnnnnnnnnnnnnnnnnnnnnnnnnnnnnnnnnnnnnnnnnnnnnnnnnnnnnnnnnnnnnnnnnnnnnnnnnnnnnnnnnnnnnnnnnnnnnnnnnnnnnnnnnnnnnnnnnnnnnnnnnnnnnnnnnnnnnnnnnnnnnnnnnnnnnnnnnnnnnnnnnnnnnnnnnnnnnnnnnnnnnnnnnnnnnnnnnnnnnnnnnnnnnnnnnnnnnnnnnnnnnnnnnnnnnnnnnnnnnnnnnnnnnnnnnnnnnnnnnnnnnnnnnnnnnnnnnnnnnnnnnnnnnnnnnnnnnnnnnnnnnnnnnnnnnnnnnnnnnnnnnnnnnnnnnnnnnnnnnnnnnnnnnnnnnnnnnnnnnnnnnnnnnnnnnnnnnnnnnnnnnnnnnnnnnnnnnnnnnnnnnnnnnnnnnnnnnnnnnnnnnnnnnnnnnnnnnnnnnnnnnnnnnnnnnnnnnnnnnnnnnnnnnnnnnnnnnnnnnnnnnnnnnnnnnnnnnnnnnnnnnnnnnnnnnnnnnnnnnnnnnnnnnnnnnnnnnnnnnnnnnnnnnnnnnnnnnnnnnnnnnnnnnnnnnnnnnnnnnnnnnnnnnnnnnnnnnnnnnnnnnnnnnnnnnnnnnnnnnnnnnnnnnnnnnnnnnnnnnnnnnnnnnnnnnnnnnnnnnnnnnnnnnnnnnnnnnnnnnnnnnnnnnnnnnnnnnnnnnnnnnnnnnnnnnnnnnnnnnnnnnnnnnnnnnnnnnnnnnnnnnnnnnnnnnnnnnnnnnnnnnnnnnnnnnnnnnnnnnnnnnnnnnnnnnnnnnnnnnnnnnnnnnnnnnnnnnnnnnnnnnnnnnnnnnnnnnnnnnnnnnnnnnnnnnnnnnnnnnnnnnnnnnnnnnnnnnnnnnnnnnnnnnnnnnnnnnnnnnnnnnnnnnnnnnnnnnnnnnnnnnnnnnnnnnnnnnnnnnnnnnnnnnnnnnnnnnnnnnnnnnnnnnnnnnnnnnnnnnnnnnnnnnnnnnnnnnnnnnnnnnnnnnnnnnnnnnnnnnnnnnnnnnnnnnnnnnnnnnnnnnnnnnnnnnnnnnnnnnnnnnnnnnnnnnnnnnnnnnnnnnnnnnnnnnnnnnnnnnnnnnnnnnnnnnnnnnnnnnnnnnnnnnnnnnnnnnnnnnnnnnnnnnnnnnnnnnnnnnnnnnnnnnnnnnnnnnnnnnnnnnnnnnnnnnnnnnnnnnnnnnnnnnnnnnnnnnnnnnnnnnnnnnnnnnnnnnnnnnnnnnnnnnnnnnnnnnnnnnnnnnnnnnnnnnnnnnnnnnnnnnnnnnnnnnnnnnnnnnnnnnnnnnnnnnnnnnnnnnnnnnnnnnnnnnnnnnnnnnnnnnnnnnnnnnnnnnnnnnnnnnnnnnnnnnnnnnnnnnnnnnnnnnnnnnnnnnnnnnnnnnnnnnnnnnnnnnnnnnnnnnnnnnnnnnnnnnnnnnnnnnnnnnnnnnnnnnnnnnnnnnnnnnnnnnnnnnnnnnnnnnnnnnnnnnnnnnnnnnnnnnnnnnnnnnnnnnnnnnnnnnnnnnnnnnnnnnnnnnnnnnnnnnnnnnnnnnnnnnnnnnnnnnnnnnnnnnnnnnnnnnnnnnnnnnnnnnnnnnnnnnnnnnnnnnnnnnnnnnnnnnnnnnnnnnnnnnnnnnnnnnnnnnnnnnnnnnnnnnnnnnnnnnnnnnnnnnnnnnnnnnnnnnnnnnnnnnnnnnnnnnnnnnnnnnnnnnnnnnnnnnnnnnnnnnnnnnnnnnnnnnnnnnnnnnnnnnnnnnnnnnnnnnnnnnnnnnnnnnnnnnnnnnnnnnnnnnnnnnnnnnnnnnnnnnnnnnnnnnnnnnnnnnnnnnnnnnnnnnnnnnnnnnnnnnnnnnnnnnnnnnnnnnnnnnnnnnnnnnnnnnnnnnnnnnnnnnnnnnnnnnnnnnnnnnnnnnnnnnnnnnnnnnnnnnnnnnnnnnnnnnnnnnnnnnnnnnnnnnnnnnnnnnnnnnnnnnnnnnnnnnnnnnnnnnnnnnnnnnnnnnnnnnnnnnnnnnnnnnnnnnnnnnnnnnnnnnnnnnnnnnnnnnnnnnnnnnnnnnnnnnnnnnnnnnnnnnnnnnnnnnnnnnnnnnnnnnnnnnnnnnnnnnnnnnnnnnnnnnnnnnnnnnnnnnnnnnnnnnnnnnnnnnnnnnnnnnnnnnnnnnnnnnnnnnnnnnnnnnnnnnnnnnnnnnnnnnnnnnnnnnnnnnnnnnnnnnnnnnnnnnnnnnnnnnnnnnnnnnnnnnnnnnnnnnnnnnnnnnnnnnnnnnnnnnnnnnnnnnnnnnnnnnnnnnnnnnnnnnnnnnnnnnnnnnnnnnnnnnnnnnnnnnnnnnnnnnnnnnnnnnnnnnnnnnnnnnnnnnnnnnnnnnnnnnnnnnnnnnnnnnnnnnnnnnnnnnnnnnnnnnnnnnnnnnnnnnnnnnnnnnnnnnnnnnnnnnnnnnnnnnnnnnnnnnnnnnnnnnnnnnnnnnnnnnnnnnnnnnnnnnnnnnnnnnnnnnnnnnnnnnnnnnnnnnnnnnnnnnnnnnnnnnnnnnnnnnnnnnnnnnnnnnnnnnnnnnnnnnnnnnnnnnnnnnnnnnnnnnnnnnnnnnnnnnnnnnnnnnnnnnnnnnnnnnnnnnnnnnnnnnnnnnnnnnnnnnnnnnnnnnnnnnnnnnnnnnnnnnnnnnnnnnnnnnnnnnnnnnnnnnnnnnnnnnnnnnnnnnnnnnnnnnnnnnnnnnnnnnnnnnnnnnnnnnnnnnnnnnnnnnnnnnnnnnnnnnnnnnnnnnnnnnnnnnnnnnnnnnnnnnnnnnnnnnnnnnnnnnnnnnnnnnnnnnnnnnnnnnnnnnnnnnnnnnnnnnnnnnnnnnnnnnnnnnnnnnnnnnnnnnnnnnnnnnnnnnnnnnnnnnnnnnnnnnnnnnnnnnnnnnnnnnnnnnnnnnnnnnnnnnnnnnnnnnnnnnnnnnnnnnnnnnnnnnnnnnnnnnnnnnnnnnnnnnnnnnnnnnnnnnnnnnnnnnnnnnnnnnnnnnnnnnnnnnnnnnnnnnnnnnnnnnnnnnnnnnnnnnnnnnnnnnnnnnnnnnnnnnnnnnnnnnnnnnnnnnnnnnnnnnnnnnnnnnnnnnnnnnnnnnnnnnnnnnnnnnnnnnnnnnnnnnnnnnnnnnnnnnnnnnnnnnnnnnnnnnnnnnnnnnnnnnnnnnnnnnnnnnnnnnnnnnnnnnnnnnnnnnnnnnnnnnnnnnnnnnnnnnnnnnnnnnnnnnnnnnnnnnnnnnnnnnnnnnnnnnnnnnnnnnnnnnnnnnnnnnnnnnnnnnnnnnnnnnnnnnnnnnnnnnnnnnnnnnnnnnnnnnnnnnnnnnnnnnnnnnnnnnnnnnnnnnnnnnnnnnnnnnnnnnnnnnnnnnnnnnnnnnnnnnnnnnnnnnnnnnnnnnnnnnnnnnnnnnnnnnnnnnnnnnnnnnnnnnnnnnnnnnnnnnnnnnnnnnnnnnnnnnnnnnnnnnnnnnnnnnnnnnnnnnnnnnnnnnnnnnnnnnnnnnnnnnnnnnnnnnnnnnnnnnnnnnnnnnnnnnnnnnnnnnnnnnnnnnnnnnnnnnnnnnnnnnnnnnnnnnnnnnnnnnnnnnnnnnnnnnnnnnnnnnnnnnnnnnnnnnnnnnnnnnnnnnnnnnnnnnnnnnnnnnnnnnnnnnnnnnnnnnnnnnnnnnnnnnnnnnnnnnnnnnnnnnnnnnnnnnnnnnnnnnnnnnnnnnnnnnnnnnnnnnnnnnnnnnnnnnnnnnnnnnnnnnnnnnnnnnnnnnnnnnnnnnnnnnnnnnnnnnnnnnnnnnnnnnnnnnnnnnnnnnnnnnnnnnnnnnnnnnnnnnnnnnnnnnnnnnnnnnnnnnnnnnnnnnnnnnnnnnnnnnnnnnnnnnnnnnnnnnnnnnnnnnnnnnnnnnnnnnnnnnnnnnnnnnnnnnnnnnnnnnnnnnnnnnnnnnnnnnnnnnnnnnnnnnnnnnnnnnnnnnnnnnnnnnnnnnnnnnnnnnnnnnnnnnnnnnnnnnnnnnnnnnnnnnnnnnnnnnnnnnnnnnnnnnnnnnnnnnnnnnnnnnnnnnnnnnnnnnnnnnnnnnnnnnnnnnnnnnnnnnnnnnnnnnnnnnnnnnnnnnnnnnnnnnnnnnnnnnnnnnnnnnnnnnnnnnnnnnnnnnnnnnnnnnnnnnnnnnnnnnnnnnnnnnnnnnnnnnnnnnnnnnnnnnnnnnnnnnnnnnnnnnnnnnnnnnnnnnnnnnnnnnnnnnnnnnnnnnnnnnnnnnnnnnnnnnnnnnnnnnnnnnnnnnnnnnnnnnnnnnnnnnnnnnnnnnnnnnnnnnnnnnnnnnnnnnnnnnnnnnnnnnnnnnnnnnnnnnnnnnnnnnnnnnnnnnnnnnnnnnnnnnnnnnnnnnnnnnnnnnnnnnnnnnnnnnnnnnnnnnnnnnnnnnnnnnnnnnnnnnnnnnnnnnnnnnnnnnnnnnnnnnnnnnnnnnnnnnnnnnnnnnnnnnnnnnnnnnnnnnnnnnnnnnnnnnnnnnnnnnnnnnnnnnnnnnnnnnnnnnnnnnnnnnnnnnnnnnnnnnnnnnnnnnnnnnnnnnnnnnnnnnnnnnnnnnnnnnnnnnnnnnnnnnnnnnnnnnnnnnnnnnnnnnnnnnnnnnnnnnnnnnnnnnnnnnnnnnnnnnnnnnnnnnnnnnnnnnnnnnnnnnnnnnnnnnnnnnnnnnnnnnnnnnnnnnnnnnnnnnnnnnnnnnnnnnnnnnnnnnnnnnnnnnnnnnnnnnnnnnnnnnnnnnnnnnnnnnnnnnnnnnnnnnnnnnnnnnnnnnnnnnnnnnnnnnnnnnnnnnnnnnnnnnnnnnnnnnnnnnnnnnnnnnnnnnnnnnnnnnnnnnnnnnnnnnnnnnnnnnnnnnnnnnnnnnnnnnnnnnnnnnnnnnnnnnnnnnnnnnnnnnnnnnnnnnnnnnnnnnnnnnnnnnnnnnnnnnnnnnnnnnnnnnnnnnnnnnnnnnnnnnnnnnnnnnnnnnnnnnnnnnnnnnnnnnnnnnnnnnnnnnnnnnnnnnnnnnnnnnnnnnnnnnnnnnnnnnnnnnnnnnnnnnnnnnnnnnnnnnnnnnnnnnnnnnnnnnnnnnnnnnnnnnnnnnnnnnnnnnnnnnnnnnnnnnnnnnnnnnnnnnnnnnnnnnnnnnnnnnnnnnnnnnnnnnnnnnnnnnnnnnnnnnnnnnnnnnnnnnnnnnnnnnnnnnnnnnnnnnnnnnnnnnnnnnnnnnnnnnnnnnnnnnnnnnnnnnnnnnnnnnnnnnnnnnnnnnnnnnnnnnnnnnnnnnnnnnnnnnnnnnnnnnnnnnnnnnnnnnnnnnnnnnnnnnnnnnnnnnnnnnnnnnnnnnnnnnnnnnnnnnnnnnnnnnnnnnnnnnnnnnnnnnnnnnnnnnnnnnnnnnnnnnnnnnnnnnnnnnnnnnnnnnnnnnnnnnnnnnnnnnnnnnnnnnnnnnnnnnnnnnnnnnnnnnnnnnnnnnnnnnnnnnnnnnnnnnnnnnnnnnnnnnnnnnnnnnnnnnnnnnnnnnnnnnnnnnnnnnnnnnnnnnnnnnnnnnnnnnnnnnnnnnnnnnnnnnnnnnnnnnnnnnnnnnnnnnnnnnnnnnnnnnnnnnnnnnnnnnnnnnnnnnnnnnnnnnnnnnnnnnnnnnnnnnnnnnnnnnnnnnnnnnnnnnnnnnnnnnnnnnnnnnnnnnnnnnnnnnnnnnnnnnnnnnnnnnnnnnnnnnnnnnnnnnnnnnnnnnnnnnnnnnnnnnnnnnnnnnnnnnnnnnnnnnnnnnnnnnnnnnnnnnnnnnnnnnnnnnnnnnnnnnnnnnnnnnnnnnnnnnnnnnnnnnnnnnnnnnnnnnnnnnnnnnnnnnnnnnnnnnnnnnnnnnnnnnnnnnnnnnnnnnnnnnnnnnnnnnnnnnnnnnnnnnnnnnnnnnnnnnnnnnnnnnnnnnnnnnnnnnnnnnnnnnnnnnnnnnnnnnnnnnnnnnnnnnnnnnnnnnnnnnnnnnnnnnnnnnnnnnnnnnnnnnnnnnnnnnnnnnnnnnnnnnnnnnnnnnnnnnnnnnnnnnnnnnnnnnnnnnnnnnnnnnnnnnnnnnnnnnnnnnnnnnnnnnnnnnnnnnnnnnnnnnnnnnnnnnnnnnnnnnnnnnnnnnnnnnnnnnnnnnnnnnnnnnnnnnnnnnnnnnnnnnnnnnnnnnnnnnnnnnnnnnnnnnnnnnnnnnnnnnnnnnnnnnnnnnnnnnnnnnnnnnnnnnnnnnnnnnnnnnnnnnnnnnnnnnnnnnnnnnnnnnnnnnnnnnnnnnnnnnnnnnnnnnnnnnnnnnnnnnnnnnnnnnnnnnnnnnnnnnnnnnnnnnnnnnnnnnnnnnnnnnnnnnnnnnnnnnnnnnnnnnnnnnnnnnnnnnnnnnnnnnnnnnnnnnnnnnnnnnnnnnnnnnnnnnnnnnnnnnnnnnnnnnnnnnnnnnnnnnnnnnnnnnnnnnnnnnnnnnnnnnnnnnnnnnnnnnnnnnnnnnnnnnnnnnnnnnnnnnnnnnnnnnnnnnnnnnnnnnnnnnnnnnnnnnnnnnnnnnnnnnnnnnnnnnnnnnnnnnnnnnnnnnnnnnnnnnnnnnnnnnnnnnnnnnnnnnnnnnnnnnnnnnnnnnnnnnnnnnnnnnnnnnnnnnnnnnnnnnnnnnnnnnnnnnnnnnnnnnnnnnnnnnnnnnnnnnnnnnnnnnnnnnnnnnnnnnnnnnnnnnnnnnnnnnnnnnnnnnnnnnnnnnnnnnnnnnnnnnnnnnnnnnnnnnnnnnnnnnnnnnnnnnnnnnnnnnnnnnnnnnnnnnnnnnnnnnnnnnnnnnnnnnnnnnnnnnnnnnnnnnnnnnnnnnnnnnnnnnnnnnnnnnnnnnnnnnnnnnnnnnnnnnnnnnnnnnnnnnnnnnnnnnnnnnnnnnnnnnnnnnnnnnnnnnnnnnnnnnnnnnnnnnnnnnnnnnnnnnnnnnnnnnnnnnnnnnnnnnnnnnnnnnnnnnnnnnnnnnnnnnnnnnnnnnnnnnnnnnnnnnnnnnnnnnnnnnnnnnnnnnnnnnnnnnnnnnnnnnnnnnnnnnnnnnnnnnnnnnnnnnnnnnnnnnnnnnnnnnnnnnnnnnnnnnnnnnnnnnnnnnnnnnnnnnnnnnnnnnnnnnnnnnnnnnnnnnnnnnnnnnnnnnnnnnnnnnnnnnnnnnnnnnnnnnnnnnnnnnnnnnnnnnnnnnnnnnnnnnnnnnnnnnnnnnnnnnnnnnnnnnnnnnnnnnnnnnnnnnnnnnnnnnnnnnnnnnnnnnnnnnnnnnnnnnnnnnnnnnnnnnnnnnnnnnnnnnnnnnnnnnnnnnnnnnnnnnnnnnnnnnnnnnnnnnnnnnnnnnnnnnnnnnnnnnnnnnnnnnnnnnnnnnnnnnnnnnnnnnnnnnnnnnnnnnnnnnnnnnnnnnnnnnnnnnnnnnnnnnnnnnnnnnnnnnnnnnnnnnnnnnnnnnnnnnnnnnnnnnnnnnnnnnnnnnnnnnnnnnnnnnnnnnnnnnnnnnnnnnnnnnnnnnnnnnnnnnnnnnnnnnnnnnnnnnnnnnnnnnnnnnnnnnnnnnnnnnnnnnnnnnnnnnnnnnnnnnnnnnnnnnnnnnnnnnnnnnnnnnnnnnnnnnnnnnnnnnnnnnnnnnnnnnnnnnnnnnnnnnnnnnnnnnnnnnnnnnnnnnnnnnnnnnnnnnnnnnnnnnnnnnnnnnnnnnnnnnnnnnnnnnnnnnnnnnnnnnnnnnnnnnnnnnnnnnnnnnnnnnnnnnnnnnnnnnnnnnnnnnnnnnnnnnnnnnnnnnnnnnnnnnnnnnnnnnnnnnnnnnnnnnnnnnnnnnnnnnnnnnnnnnnnnnnnnnnnnnnnnnnnnnnnnnnnnnnnnnnnnnnnnnnnnnnnnnnnnnnnnnnnnnnnnnnnnnnnnnnnnnnnnnnnnnnnnnnnnnnnnnnnnnnnnnnnnnnnnnnnnnnnnnnnnnnnnnnnnnnnnnnnnnnnnnnnnnnnnnnnnnnnnnnnnnnnnnnnnnnnnnnnnnnnnnnnnnnnnnnnnnnnnnnnnnnnnnnnnnnnnnnnnnnnnnnnnnnnnnnnnnnnnnnnnnnnnnnnnnnnnnnnnnnnnnnnnnnnnnnnnnnnnnnnnnnnnnnnnnnnnnnnnnnnnnnnnnnnnnnnnnnnnnnnnnnnnnnnnnnnnnnnnnnnnnnnnnnnnnnnnnnnnnnnnnnnnnnnnnnnnnnnnnnnnnnnnnnnnnnnnnnnnnnnnnnnnnnnnnnnnnnnnnnnnnnnnnnnnnnnnnnnnnnnnnnnnnnnnnnnnnnnnnnnnnnnnnnnnnnnnnnnnnnnnnnnnnnnnnnnnnnnnnnnnnnnnnnnnnnnnnnnnnnnnnnnnnnnnnnnnnnnnnnnnnnnnnnnnnnnnnnnnnnnnnnnnnnnnnnnnnnnnnnnnnnnnnnnnnnnnnnnnnnnnnnnnnnnnnnnnnnnnnnnnnnnnnnnnnnnnnnnnnnnnnnnnnnnnnnnnnnnnnnnnnnnnnnnnnnnnnnnnnnnnnnnnnnnnnnnnnnnnnnnnnnnnnnnnnnnnnnnnnnnnnnnnnnnnnnnnnnnnnnnnnnnnnnnnnnnnnnnnnnnnnnnnnnnnnnnnnnnnnnnnnnnnnnnnnnnnnnnnnnnnnnnnnnnnnnnnnnnnnnnnnnnnnnnnnnnnnnnnnnnnnnnnnnnnnnnnnnnnnnnnnnnnnnnnnnnnnnnnnnnnnnnnnnnnnnnnnnnnnnnnnnnnnnnnnnnnnnnnnnnnnnnnnnnnnnnnnnnnnnnnnnnnnnnnnnnnnnnnnnnnnnnnnnnnnnnnnnnnnnnnnnnnnnnnnnnnnnnnnnnnnnnnnnnnnnnnnnnnnnnnnnnnnnnnnnnnnnnnnnnnnnnnnnnnnnnnnnnnnnnnnnnnnnnnnnnnnnnnnnnnnnnnnnnnnnnnnnnnnnnnnnnnnnnnnnnnnnnnnnnnnnnnnnnnnnnnnnnnnnnnnnnnnnnnnnnnnnnnnnnnnnnnnnnnnnnnnnnnnnnnnnnnnnnnnnnnnnnnnnnnnnnnnnnnnnnnnnnnnnnnnnnnnnnnnnnnnnnnnnnnnnnnnnnnnnnnnnnnnnnnnnnnnnnnnnnnnnnnnnnnnnnnnnnnnnnnnnnnnnnnnnnnnnnnnnnnnnnnnnnnnnnnnnnnnnnnnnnnnnnnnnnnnnnnnnnnnnnnnnnnnnnnnnnnnnnnnnnnnnnnnnnnnnnnnnnnnnnnnnnnnnnnnnnnnnnnnnnnnnnnnnnnnnnnnnnnnnnnnnnnnnnnnnnnnnnnnnnnnnnnnnnnnnnnnnnnnnnnnnnnnnnnnnnnnnnnnnnnnnnnnnnnnnnnnnnnnnnnnnnnnnnnnnnnnnnnnnnnnnnnnnnnnnnnnnnnnnnnnnnnnnnnnnnnnnnnnnnnnnnnnnnnnnnnnnnnnnnnnnnnnnnnnnnnnnnnnnnnnnnnnnnnnnnnnnnnnnnnnnnnnnnnnnnnnnnnnnnnnnnnnnnnnnnnnnnnnnnnnnnnnnnnnnnnnnnnnnnnnnnnnnnnnnnnnnnnnnnnnnnnnnnnnnnnnnnnnnnnnnnnnnnnnnnnnnnnnnnnnnnnnnnnnnnnnnnnnnnnnnnnnnnnnnnnnnnnnnnnnnnnnnnnnnnnnnnnnnnnnnnnnnnnnnnnnnnnnnnnnnnnnnnnnnnnnnnnnnnnnnnnnnnnnnnnnnnnnnnnnnnnnnnnnnnnnnnnnnnnnnnnnnnnnnnnnnnnnnnnnnnnnnnnnnnnnnnnnnnnnnnnnnnnnnnnnnnnnnnnnnnnnnnnnnnnnnnnnnnnnnnnnnnnnnnnnnnnnnnnnnnnnnnnnnnnnnnnnnnnnnnnnnnnnnnnnnnnnnnnnnnnnnnnnnnnnnnnnnnnnnnnnnnnnnnnnnnnnnnnnnnnnnnnnnnnnnnnnnnnnnnnnnnnnnnnnnnnnnnnnnnnnnnnnnnnnnnnnnnnnnnnnnnnnnnnnnnnnnnnnnnnnnnnnnnnnnnnnnnnnnnnnnnnnnnnnnnnnnnnnnnnnnnnnnnnnnnnnnnnnnnnnnnnnnnnnnnnnnnnnnnnnnnnnnnnnnnnnnnnnnnnnnnnnnnnnnnnnnnnnnnnnnnnnnnnnnnnnnnnnnnnnnnnnnnnnnnnnnnnnnnnnnnnnnnnnnnnnnnnnnnnnnnnnnnnnnnnnnnnnnnnnnnnnnnnnnnnnnnnnnnnnnnnnnnnnnnnnnnnnnnnnnnnnnnnnnnnnnnnnnnnnnnnnnnnnnnnnnnnnnnnnnnnnnnnnnnnnnnnnnnnnnnnnnnnnnnnnnnnnnnnnnnnnnnnnnnnnnnnnnnnnnnnnnnnnnnnnnnnnnnnnnnnnnnnnnnnnnnnnnnnnnnnnnnnnnnnnnnnnnnnnnnnnnnnnnnnnnnnnnnnnnnnnnnnnnnnnnnnnnnnnnnnnnnnnnnnnnnnnnnnnnnnnnnnnnnnnnnnnnnnnnnnnnnnnnnnnnnnnnnnnnnnnnnnnnnnnnnnnnnnnnnnnnnnnnnnnnnnnnnnnnnnnnnnnnnnnnnnnnnnnnnnnnnnnnnnnnnnnnnnnnnnnnnnnnnnnnnnnnnnnnnnnnnnnnnnnnnnnnnnnnnnnnnnnnnnnnnnnnnnnnnnnnnnnnnnnnnnnnnnnnnnnnnnnnnnnnnnnnnnnnnnnnnnnnnnnnnnnnnnnnnnnnnnnnnnnnnnnnnnnnnnnnnnnnnnnnnnnnnnnnnnnnnnnnnnnnnnnnnnnnnnnnnnnnnnnnnnnnnnnnnnnnnnnnnnnnnnnnnnnnnnnnnnnnnnnnnnnnnnnnnnnnnnnnnnnnnnnnnnnnnnnnnnnnnnnnnnnnnnnnnnnnnnnnnnnnnnnnnnnnnnnnnnnnnnnnnnnnnnnnnnnnnnnnnnnnnnnnnnnnnnnnnnnnnnnnnnnnnnnnnnnnnnnnnnnnnnnnnnnnnnnnnnnnnnnnnnnnnnnnnnnnnnnnnnnnnnnnnnnnnnnnnnnnnnnnnnnnnnnnnnnnnnnnnnnnnnnnnnnnnnnnnnnnnnnnnnnnnnnnnnnnnnnnnnnnnnnnnnnnnnnnnnnnnnnnnnnnnnnnnnnnnnnnnnnnnnnnnnnnnnnnnnnnnnnnnnnnnnnnnnnnnnnnnnnnnnnnnnnnnnnnnnnnnnnnnnnnnnnnnnnnnnnnnnnnnnnnnnnnnnnnnnnnnnnnnnnnnnnnnnnnnnnnnnnnnnnnnnnnnnnnnnnnnnnnnnnnnnnnnnnnnnnnnnnnnnnnnnnnnnnnnnnnnnnnnnnnnnnnnnnnnnnnnnnnnnnnnnnnnnnnnnnnnnnnnnnnnnnnnnnnnnnnnnnnnnnnnnnnnnnnnnnnnnnnnnnnnnnnnnnnnnnnnnnnnnnnnnnnnnnnnnnnnnnnnnnnnnnnnnnnnnnnnnnnnnnnnnnnnnnnnnnnnnnnnnnnnnnnnnnnnnnnnnnnnnnnnnnnnnnnnnnnnnnnnnnnnnnnnnnnnnnnnnnnnnnnnnnnnnnnnnnnnnnnnnnnnnnnnnnnnnnnnnnnnnnnnnnnnnnnnnnnnnnnnnnnnnnnnnnnnnnnnnnnnnnnnnnnnnnnnnnnnnnnnnnnnnnnnnnnnnnnnnnnnnnnnnnnnnnnnnnnnnnnnnnnnnnnnnnnnnnnnnnnnnnnnnnnnnnnnnnnnnnnnnnnnnnnnnnnnnnnnnnnnnnnnnnnnnnnnnnnnnnnnnnnnnnnnnnnnnnnnnnnnnnnnnnnnnnnnnnnnnnnnnnnnnnnnnnnnnnnnnnnnnnnnnnnnnnnnnnnnnnnnnnnnnnnnnnnnnnnnnnnnnnnnnnnnnnnnnnnnnnnnnnnnnnnnnnnnnnnnnnnnnnnnnnnnnnnnnnnnnnnnnnnnnnnnnnnnnnnnnnnnnnnnnnnnnnnnnnnnnnnnnnnnnnnnnnnnnnnnnnnnnnnnnnnnnnnnnnnnnnnnnnnnnnnnnnnnnnnnnnnnnnnnnnnnnnnnnnnnnnnnnnnnnnnnnnnnnnnnnnnnnnnnnnnnnnnnnnnnnnnnnnnnnnnnnnnnnnnnnnnnnnnnnnnnnnnnnnnnnnnnnnnnnnnnnnnnnnnnnnnnnnnnnnnnnnnnnnnnnnnnnnnnnnnnnnnnnnnnnnnnnnnnnnnnnnnnnnnnnnnnnnnnnnnnnnnnnnnnnnnnnnnnnnnnnnnnnnnnnnnnnnnnnnnnnnnnnnnnnnnnnnnnnnnnnnnnnnnnnnnnnnnnnnnnnnnnnnnnnnnnnnnnnnnnnnnnnnnnnnnnnnnnnnnnnnnnnnnnnnnnnnnnnnnnnnnnnnnnnnnnnnnnnnnnnnnnnnnnnnnnnnnnnnnnnnnnnnnnnnnnnnnnnnnnnnnnnnnnnnnnnnnnnnnnnnnnnnnnnnnnnnnnnnnnnnnnnnnnnnnnnnnnnnnnnnnnnnnnnnnnnnnnnnnnnnnnnnnnnnnnnnnnnnnnnnnnnnnnnnnnnnnnnnnnnnnnnnnnnnnnnnnnnnnnnnnnnnnnnnnnnnnnnnnnnnnnnnnnnnnnnnnnnnnnnnnnnnnnnnnnnnnnnnnnnnnnnnnnnnnnnnnnnnnnnnnnnnnnnnnnnnnnnnnnnnnnnnnnnnnnnnnnnnnnnnnnnnnnnnnnnnnnnnnnnnnnnnnnnnnnnnnnnnnnnnnnnnnnnnnnnnnnnnnnnnnnnnnnnnnnnnnnnnnnnnnnnnnnnnnnnnnnnnnnnnnnnnnnnnnnnnnnnnnnnnnnnnnnnnnnnnnnnnnnnnnnnnnnnnnnnnnnnnnnnnnnnnnnnnnnnnnnnnnnnnnnnnnnnnnnnnnnnnnnnnnnnnnnnnnnnnnnnnnnnnnnnnnnnnnnnnnnnnnnnnnnnnnnnnnnnnnnnnnnnnnnnnnnnnnnnnnnnnnnnnnnnnnnnnnnnnnnnnnnnnnnnnnnnnnnnnnnnnnnnnnnnnnnnnnnnnnnnnnnnnnnnnnnnnnnnnnnnnnnnnnnnnnnnnnnnnnnnnnnnnnnnnnnnnnnnnnnnnnnnnnnnnnnnnnnnnnnnnnnnnnnnnnnnnnnnnnnnnnnnnnnnnnnnnnnnnnnnnnnnnnnnnnnnnnnnnnnnnnnnnnnnnnnnnnnnnnnnnnnnnnnnnnnnnnnnnnnnnnnnnnnnnnnnnnnnnnnnnnnnnnnnnnnnnnnnnnnnnnnnnnnnnnnnnnnnnnnnnnnnnnnnnnnnnnnnnnnnnnnnnnnnnnnnnnnnnnnnnnnnnnnnnnnnnnnnnnnnnnnnnnnnnnnnnnnnnnnnnnnnnnnnnnnnnnnnnnnnnnnnnnnnnnnnnnnnnnnnnnnnnnnnnnnnnnnnnnnnnnnnnnnnnnnnnnnnnnnnnnnnnnnnnnnnnnnnnnnnnnnnnnnnnnnnnnnnnnnnnnnnnnnnnnnnnnnnnnnnnnnnnnnnnnnnnnnnnnnnnnnnnnnnnnnnnnnnnnnnnnnnnnnnnnnnnnnnnnnnnnnnnnnnnnnnnnnnnnnnnnnnnnnnnnnnnnnnnnnnnnnnnnnnnnnnnnnnnnnnnnnnnnnnnnnnnnnnnnnnnnnnnnnnnnnnnnnnnnnnnnnnnnnnnnnnnnnnnnnnnnnnnnnnnnnnnnnnnnnnnnnnnnnnnnnnnnnnnnnnnnnnnnnnnnnnnnnnnnnnnnnnnnnnnnnnnnnnnnnnnnnnnnnnnnnnnnnnnnnnnnnnnnnnnnnnnnnnnnnnnnnnnnnnnnnnnnnnnnnnnnnnnnnnnnnnnnnnnnnnnnnnnnnnnnnnnnnnnnnnnnnnnnnnnnnnnnnnnnnnnnnnnnnnnnnnnnnnnnnnnnnnnnnnnnnnnnnnnnnnnnnnnnnnnnnnnnnnnnnnnnnnnnnnnnnnnnnnnnnnnnnnnnnnnnnnnnnnnnnnnnnnnnnnnnnnnnnnnnnnnnnnnnnnnnnnnnnnnnnnnnnnnnnnnnnnnnnnnnnnnnnnnnnnnnnnnnnnnnnnnnnnnnnnnnnnnnnnnnnnnnnnnnnnnnnnnnnnnnnnnnnnnnnnnnnnnnnnnnnnnnnnnnnnnnnnnnnnnnnnnnnnnnnnnnnnnnnnnnnnnnnnnnnnnnnnnnnnnnnnnnnnnnnnnnnnnnnnnnnnnnnnnnnnnnnnnnnnnnnnnnnnnnnnnnnnnnnnnnnnnnnnnnnnnnnnnnnnnnnnnnnnnnnnnnnnnnnnnnnnnnnnnnnnnnnnnnnnnnnnnnnnnnnnnnnnnnnnnnnnnnnnnnnnnnnnnnnnnnnnnnnnnnnnnnnnnnnnnnnnnnnnnnnnnnnnnnnnnnnnnnnnnnnnnnnnnnnnnnnnnnnnnnnnnnnnnnnnnnnnnnnnnnnnnnnnnnnnnnnnnnnnnnnnnnnnnnnnnnnnnnnnnnnnnnnnnnnnnnnnnnnnnnnnnnnnnnnnnnnnnnnnnnnnnnnnnnnnnnnnnnnnnnnnnnnnnnnnnnnnnnnnnnnnnnnnnnnnnnnnnnnnnnnnnnnnnnnnnnnnnnnnnnnnnnnnnnnnnnnnnnnnnnnnnnnnnnnnnnnnnnnnnnnnnnnnnnnnnnnnnnnnnnnnnnnnnnnnnnnnnnnnnnnnnnnnnnnnnnnnnnnnnnnnnnnnnnnnnnnnnnnnnnnnnnnnnnnnnnnnnnnnnnnnnnnnnnnnnnnnnnnnnnnnnnnnnnnnnnnnnnnnnnnnnnnnnnnnnnnnnnnnnnnnnnnnnnnnnnnnnnnnnnnnnnnnnnnnnnnnnnnnnnnnnnnnnnnnnnnnnnnnnnnnnnnnnnnnnnnnnnnnnnnnnnnnnnnnnnnnnnnnnnnnnnnnnnnnnnnnnnnnnnnnnnnnnnnnnnnnnnnnnnnnnnnnnnnnnnnnnnnnnnnnnnnnnnnnnnnnnnnnnnnnnnnnnnnnnnnnnnnnnnnnnnnnnnnnnnnnnnnnnnnnnnnnnnnnnnnnnnnnnnnnnnnnnnnnnnnnnnnnnnnnnnnnnnnnnnnnnnnnnnnnnnnnnnnnnnnnnnnnnnnnnnnnnnnnnnnnnnnnnnnnnnnnnnnnnnnnnnnnnnnnnnnnnnnnnnnnnnnnnnnnnnnnnnnnnnnnnnnnnnnnnnnnnnnnnnnnnnnnnnnnnnnnnnnnnnnnnnnnnnnnnnnnnnnnnnnnnnnnnnnnnnnnnnnnnnnnnnnnnnnnnnnnnnnnnnnnnnnnnnnnnnnnnnnnnnnnnnnnnnnnnnnnnnnnnnnnnnnnnnnnnnnnnnnnnnnnnnnnnnnnnnnnnnnnnnnnnnnnnnnnnnnnnnnnnnnnnnnnnnnnnnnnnnnnnnnnnnnnnnnnnnnnnnnnnnnnnnnnnnnnnnnnnnnnnnnnnnnnnnnnnnnnnnnnnnnnnnnnnnnnnnnnnnnnnnnnnnnnnnnnnnnnnnnnnnnnnnnnnnnnnnnnnnnnnnnnnnnnnnnnnnnnnnnnnnnnnnnnnnnnnnnnnnnnnnnnnnnnnnnnnnnnnnnnnnnnnnnnnnnnnnnnnnnnnnnnnnnnnnnnnnnnnnnnnnnnnnnnnnnnnnnnnnnnnnnnnnnnnnnnnnnnnnnnnnnnnnnnnnnnnnnnnnnnnnnnnnnnnnnnnnnnnnnnnnnnnnnnnnnnnnnnnnnnnnnnnnnnnnnnnnnnnnnnnnnnnnnnnnnnnnnnnnnnnnnnnnnnnnnnnnnnnnnnnnnnnnnnnnnnnnnnnnnnnnnnnnnnnnnnnnnnnnnnnnnnnnnnnnnnnnnnnnnnnnnnnnnnnnnnnnnnnnnnnnnnnnnnnnnnnnnnnnnnnnnnnnnnnnnnnnnnnnnnnnnnnnnnnnnnnnnnnnnnnnnnnnnnnnnnnnnnnnnnnnnnnnnnnnnnnnnnnnnnnnnnnnnnnnnnnnnnnnnnnnnnnnnnnnnnnnnnnnnnnnnnnnnnnnnnnnnnnnnnnnnnnnnnnnnnnnnnnnnnnnnnnnnnnnnnnnnnnnnnnnnnnnnnnnnnnnnnnnnnnnnnnnnnnnnnnnnnnnnnnnnnnnnnnnnnnnnnnnnnnnnnnnnnnnnnnnnnnnnnnnnnnnnnnnnnnnnnnnnnnnnnnnnnnnnnnnnnnnnnnnnnnnnnnnnnnnnnnnnnnnnnnnnnnnnnnnnnnnnnnnnnnnnnnnnnnnnnnnnnnnnnnnnnnnnnnnnnnnnnnnnnnnnnnnnnnnnnnnnnnnnnnnnnnnnnnnnnnnnnnnnnnnnnnnnnnnnnnnnnnnnnnnnnnnnnnnnnnnnnnnnnnnnnnnnnnnnnnnnnnnnnnnnnnnnnnnnnnnnnnnnnnnnnnnnnnnnnnnnnnnnnnnnnnnnnnnnnnnnnnnnnnnnnnnnnnnnnnnnnnnnnnnnnnnnnnnnnnnnnnnnnnnnnnnnnnnnnnnnnnnnnnnnnnnnnnnnnnnnnnnnnnnnnnnnnnnnnnnnnnnnnnnnnnnnnnnnnnnnnnnnnnnnnnnnnnnnnnnnnnnnnnnnnnnnnnnnnnnnnnnnnnnnnnnnnnnnnnnnnnnnnnnnnnnnnnnnnnnnnnnnnnnnnnnnnnnnnnnnnnnnnnnnnnnnnnnnnnnnnnnnnnnnnnnnnnnnnnnnnnnnnnnnnnnnnnnnnnnnnnnnnnnnnnnnnnnnnnnnnnnnnnnnnnnnnnnnnnnnnnnnnnnnnnnnnnnnnnnnnnnnnnnnnnnnnnnnnnnnnnnnnnnnnnnnnnnnnnnnnnnnnnnnnnnnnnnnnnnnnnnnnnnnnnnnnnnnnnnnnnnnnnnnnnnnnnnnnnnnnnnnnnnnnnnnnnnnnnnnnnnnnnnnnnnnnnnnnnnnnnnnnnnnnnnnnnnnnnnnnnnnnnnnnnnnnnnnnnnnnnnnnnnnnnnnnnnnnnnnnnnnnnnnnnnnnnnnnnnnnnnnnnnnnnnnnnnnnnnnnnnnnnnnnnnnnnnnnnnnnnnnnnnnnnnnnnnnnnnnnnnnnnnnnnnnnnnnnnnnnnnnnnnnnnnnnnnnnnnnnnnnnnnnnnnnnnnnnnnnnnnnnnnnnnnnnnnnnnnnnnnnnnnnnnnnnnnnnnnnnnnnnnnnnnnnnnnnnnnnnnnnnnnnnnnnnnnnnnnnnnnnnnnnnnnnnnnnnnnnnnnnnnnnnnnnnnnnnnnnnnnnnnnnnnnnnnnnnnnnnnnnnnnnnnnnnnnnnnnnnnnnnnnnnnnnnnnnnnnnnnnnnnnnnnnnnnnnnnnnnnnnnnnnnnnnnnnnnnnnnnnnnnnnnnnnnnnnnnnnnnnnnnnnnnnnnnnnnnnnnnnnnnnnnnnnnnnnnnnnnnnnnnnnnnnnnnnnnnnnnnnnnnnnnnnnnnnnnnnnnnnnnnnnnnnnnnnnnnnnnnnnnnnnnnnnnnnnnnnnnnnnnnnnnnnnnnnnnnnnnnnnnnnnnnnnnnnnnnnnnnnnnnnnnnnnnnnnnnnnnnnnnnnnnnnnnnnnnnnnnnnnnnnnnnnnnnnnnnnnnnnnnnnnnnnnnnnnnnnnnnnnnnnnnnnnnnnnnnnnnnnnnnnnnnnnnnnnnnnnnnnnnnnnnnnnnnnnnnnnnnnnnnnnnnnnnnnnnnnnnnnnnnnnnnnnnnnnnnnnnnnnnnnnnnnnnnnnnnnnnnnnnnnnnnnnnnnnnnnnnnnnnnnnnnnnnnnnnnnnnnnnnnnnnnnnnnnnnnnnnnnnnnnnnnnnnnnnnnnnnnnnnnnnnnnnnnnnnnnnnnnnnnnnnnnnnnnnnnnnnnnnnnnnnnnnnnnnnnnnnnnnnnnnnnnnnnnnnnnnnnnnnnnnnnnnnnnnnnnnnnnnnnnnnnnnnnnnnnnnnnnnnnnnnnnnnnnnnnnnnnnnnnnnnnnnnnnnnnnnnnnnnnnnnnnnnnnnnnnnnnnnnnnnnnnnnnnnnnnnnnnnnnnnnnnnnnnnnnnnnnnnnnnnnnnnnnnnnnnnnnnnnnnnnnnnnnnnnnnnnnnnnnnnnnnnnnnnnnnnnnnnnnnnnnnnnnnnnnnnnnnnnnnnnnnnnnnnnnnnnnnnnnnnnnnnnnnnnnnnnnnnnnnnnnnnnnnnnnnnnnnnnnnnnnnnnnnnnnnnnnnnnnnnnnnnnnnnnnnnnnnnnnnnnnnnnnnnnnnnnnnnnnnnnnnnnnnnnnnnnnnnnnnnnnnnnnnnnnnnnnnnnnnnnnnnnnnnnnnnnnnnnnnnnnnnnnnnnnnnnnnnnnnnnnnnnnnnnnnnnnnnnnnnnnnnnnnnnnnnnnnnnnnnnnnnnnnnnnnnnnnnnnnnnnnnnnnnnnnnnnnnnnnnnnnnnnnnnnnnnnnnnnnnnnnnnnnnnnnnnnnnnnnnnnnnnnnnnnnnnnnnnnnnnnnnnnnnnnnnnnnnnnnnnnnnnnnnnnnnnnnnnnnnnnnnnnnnnnnnnnnnnnnnnnnnnnnnnnnnnnnnnnnnnnnnnnnnnnnnnnnnnnnnnnnnnnnnnnnnnnnnnnnnnnnnnnnnnnnnnnnnnnnnnnnnnnnnnnnnnnnnnnnnnnnnnnnnnnnnnnnnnnnnnnnnnnnnnnnnnnnnnnnnnnnnnnnnnnnnnnnnnnnnnnnnnnnnnnnnnnnnnnnnnnnnnnnnnnnnnnnnnnnnnnnnnnnnnnnnnnnnnnnnnnnnnnnnnnnnnnnnnnnnnnnnnnnnnnnnnnnnnnnnnnnnnnnnnnnnnnnnnnnnnnnnnnnnnnnnnnnnnnnnnnnnnnnnnnnnnnnnnnnnnnnnnnnnnnnnnnnnnnnnnnnnnnnnnnnnnnnnnnnnnnnnnnnnnnnnnnnnnnnnnnnnnnnnnnnnnnnnnnnnnnnnnnnnnnnnnnnnnnnnnnnnnnnnnnnnnnnnnnnnnnnnnnnnnnnnnnnnnnnnnnnnnnnnnnnnnnnnnnnnnnnnnnnnnnnnnnnnnnnnnnnnnnnnnnnnnnnnnnnnnnnnnnnnnnnnnnnnnnnnnnnnnnnnnnnnnnnnnnnnnnnnnnnnnnnnnnnnnnnnnnnnnnnnnnnnnnnnnnnnnnnnnnnnnnnnnnnnnnnnnnnnnnnnnnnnnnnnnnnnnnnnnnnnnnnnnnnnnnnnnnnnnnnnnnnnnnnnnnnnnnnnnnnnnnnnnnnnnnnnnnnnnnnnnnnnnnnnnnnnnnnnnnnnnnnnnnnnnnnnnnnnnnnnnnnnnnnnnnnnnnnnnnnnnnnnnnnnnnnnnnnnnnnnnnnnnnnnnnnnnnnnnnnnnnnnnnnnnnnnnnnnnnnnnnnnnnnnnnnnnnnnnnnnnnnnnnnnnnnnnnnnnnnnnnnnnnnnnnnnnnnnnnnnnnnnnnnnnnnnnnnnnnnnnnnnnnnnnnnnnnnnnnnnnnnnnnnnnnnnnnnnnnnnnnnnnnnnnnnnnnnnnnnnnnnnnnnnnnnnnnnnnnnnnnnnnnnnnnnnnnnnnnnnnnnnnnnnnnnnnnnnnnnnnnnnnnnnnnnnnnnnnnnnnnnnnnnnnnnnnnnnnnnnnnnnnnnnnnnnnnnnnnnnnnnnnnnnnnnnnnnnnnnnnnnnnnnnnnnnnnnnnnnnnnnnnnnnnnnnnnnnnnnnnnnnnnnnnnnnnnnnnnnnnnnnnnnnnnnnnnnnnnnnnnnnnnnnnnnnnnnnnnnnnnnnnnnnnnnnnnnnnnnnnnnnnnnnnnnnnnnnnnnnnnnnnnnnnnnnnnnnnnnnnnnnnnnnnnnnnnnnnnnnnnnnnnnnnnnnnnnnnnnnnnnnnnnnnnnnnnnnnnnnnnnnnnnnnnnnnnnnnnnnnnnnnnnnnnnnnnnnnnnnnnnnnnnnnnnnnnnnnnnnnnnnnnnnnnnnnnnnnnnnnnnnnnnnnnnnnnnnnnnnnnnnnnnnnnnnnnnnnnnnnnnnnnnnnnnnnnnnnnnnnnnnnnnnnnnnnnnnnnnnnnnnnnnnnnnnnnnnnnnnnnnnnnnnnnnnnnnnnnnnnnnnnnnnnnnnnnnnnnnnnnnnnnnnnnnnnnnnnnnnnnnnnnnnnnnnnnnnnnnnnnnnnnnnnnnnnnnnnnnnnnnnnnnnnnnnnnnnnnnnnnnnnnnnnnnnnnnnnnnnnnnnnnnnnnnnnnnnnnnnnnnnnnnnnnnnnnnnnnnnnnnnnnnnnnnnnnnnnnnnnnnnnnnnnnnnnnnnnnnnnnnnnnnnnnnnnnnnnnnnnnnnnnnnnnnnnnnnnnnnnnnnnnnnnnnnnnnnnnnnnnnnnnnnnnnnnnnnnnnnnnnnnnnnnnnnnnnnnnnnnnnnnnnnnnnnnnnnnnnnnnnnnnnnnnnnnnnnnnnnnnnnnnnnnnnnnnnnnnnnnnnnnnnnnnnnnnnnnnnnnnnnnnnnnnnnnnnnnnnnnnnnnnnnnnnnnnnnnnnnnnnnnnnnnnnnnnnnnnnnnnnnnnnnnnnnnnnnnnnnnnnnnnnnnnnnnnnnnnnnnnnnnnnnnnnnnnnnnnnnnnnnnnnnnnnnnnnnnnnnnnnnnnnnnnnnnnnnnnnnnnnnnnnnnnnnnnnnnnnnnnnnnnnnnnnnnnnnnnnnnnnnnnnnnnnnnnnnnnnnnnnnnnnnnnnnnnnnnnnnnnnnnnnnnnnnnnnnnnnnnnnnnnnnnnnnnnnnnnnnnnnnnnnnnnnnnnnnnnnnnnnnnnnnnnnnnnnnnnnnnnnnnnnnnnnnnnnnnnnnnnnnnnnnnnnnnnnnnnnnnnnnnnnnnnnnnnnnnnnnnnnnnnnnnnnnnnnnnnnnnnnnnnnnnnnnnnnnnnnnnnnnnnnnnnnnnnnnnnnnnnnnnnnnnnnnnnnnnnnnnnnnnnnnnnnnnnnnnnnnnnnnnnnnnnnnnnnnnnnnnnnnnnnnnnnnnnnnnnnnnnnnnnnnnnnnnnnnnnnnnnnnnnnnnnnnnnnnnnnnnnnnnnnnnnnnnnnnnnnnnnnnnnnnnnnnnnnnnnnnnnnnnnnnnnnnnnnnnnnnnnnnnnnnnnnnnnnnnnnnnnnnnnnnnnnnnnnnnnnnnnnnnnnnnnnnnnnnnnnnnnnnnnnnnnnnnnnnnnnnnnnnnnnnnnnnnnnnnnnnnnnnnnnnnnnnnnnnnnnnnnnnnnnnnnnnnnnnnnnnnnnnnnnnnnnnnnnnnnnnnnnnnnnnnnnnnnnnnnnnnnnnnnnnnnnnnnnnnnnnnnnnnnnnnnnnnnnnnnnnnnnnnnnnnnnnnnnnnnnnnnnnnnnnnnnnnnnnnnnnnnnnnnnnnnnnnnnnnnnnnnnnnnnnnnnnnnnnnnnnnnnnnnnnnnnnnnnnnnnnnnnnnnnnnnnnnnnnnnnnnnnnnnnnnnnnnnnnnnnnnnnnnnnnnnnnnnnnnnnnnnnnnnnnnnnnnnnnnnnnnnnnnnnnnnnnnnnnnnnnnnnnnnnnnnnnnnnnnnnnnnnnnnnnnnnnnnnnnnnnnnnnnnnnnnnnnnnnnnnnnnnnnnnnnnnnnnnnnnnnnnnnnnnnnnnnnnnnnnnnnnnnnnnnnnnnnnnnnnnnnnnnnnnnnnnnnnnnnnnnnnnnnnnnnnnnnnnnnnnnnnnnnnnnnnnnnnnnnnnnnnnnnnnnnnnnnnnnnnnnnnnnnnnnnnnnnnnnnnnnnnnnnnnnnnnnnnnnnnnnnnnnnnnnnnnnnnnnnnnnnnnnnnnnnnnnnnnnnnnnnnnnnnnnnnnnnnnnnnnnnnnnnnnnnnnnnnnnnnnnnnnnnnnnnnnnnnnnnnnnnnnnnnnnnnnnnnnnnnnnnnnnnnnnnnnnnnnnnnnnnnnnnnnnnnnnnnnnnnnnnnnnnnnnnnnnnnnnnnnnnnnnnnnnnnnnnnnnnnnnnnnnnnnnnnnnnnnnnnnnnnnnnnnnnnnnnnnnnnnnnnnnnnnnnnnnnnnnnnnnnnnnnnnnnnnnnnnnnnnnnnnnnnnnnnnnnnnnnnnnnnnnnnnnnnnnnnnnnnnnnnnnnnnnnnnnnnnnnnnnnnnnnnnnnnnnnnnnnnnnnnnnnnnnnnnnnnnnnnnnnnnnnnnnnnnnnnnnnnnnnnnnnnnnnnnnnnnnnnnnnnnnnnnnnnnnnnnnnnnnnnnnnnnnnnnnnnnnnnnnnnnnnnnnnnnnnnnnnnnnnnnnnnnnnnnnnnnnnnnnnnnnnnnnnnnnnnnnnnnnnnnnnnnnnnnnnnnnnnnnnnnnnnnnnnnnnnnnnnnnnnnnnnnnnnnnnnnnnnnnnnnnnnnnnnnnnnnnnnnnnnnnnnnnnnnnnnnnnnnnnnnnnnnnnnnnnnnnnnnnnnnnnnnnnnnnnnnnnnnnnnnnnnnnnnnnnnnnnnnnnnnnnnnnnnnnnnnnnnnnnnnnnnnnnnnnnnnnnnnnnnnnnnnnnnnnnnnnnnnnnnnnnnnnnnnnnnnnnnnnnnnnnnnnnnnnnnnnnnnnnnnnnnnnnnnnnnnnnnnnnnnnnnnnnnnnnnnnnnnnnnnnnnnnnnnnnnnnnnnnnnnnnnnnnnnnnnnnnnnnnnnnnnnnnnnnnnnnnnnnnnnnnnnnnnnnnnnnnnnnnnnnnnnnnnnnnnnnnnnnnnnnnnnnnnnnnnnnnnnnnnnnnnnnnnnnnnnnnnnnnnnnnnnnnnnnnnnnnnnnnnnnnnnnnnnnnnnnnnnnnnnnnnnnnnnnnnnnnnnnnnnnnnnnnnnnnnnnnnnnnnnnnnnnnnnnnnnnnnnnnnnnnnnnnnnnnnnnnnnnnnnnnnnnnnnnnnnnnnnnnnnnnnnnnnnnnnnnnnnnnnnnnnnnnnnnnnnnnnnnnnnnnnnnnnnnnnnnnnnnnnnnnnnnnnnnnnnnnnnnnnnnnnnnnnnnnnnnnnnnnnnnnnnnnnnnnnnnnnnnnnnnnnnnnnnnnnnnnnnnnnnnnnnnnnnnnnnnnnnnnnnnnnnnnnnnnnnnnnnnnnnnnnnnnnnnnnnnnnnnnnnnnnnnnnnnnnnnnnnnnnnnnnnnnnnnnnnnnnnnnnnnnnnnnnnnnnnnnnnnnnnnnnnnnnnnnnnnnnnnnnnnnnnnnnnnnnnnnnnnnnnnnnnnnnnnnnnnnnnnnnnnnnnnnnnnnnnnnnnnnnnnnnnnnnnnnnnnnnnnnnnnnnnnnnnnnnnnnnnnnnnnnnnnnnnnnnnnnnnnnnnnnnnnnnnnnnnnnnnnnnnnnnnnnnnnnnnnnnnnnnnnnnnnnnnnnnnnnnnnnnnnnnnnnnnnnnnnnnnnnnnnnnnnnnnnnnnnnnnnnnnnnnnnnnnnnnnnnnnnnnnnnnnnnnnnnnnnnnnnnnnnnnnnnnnnnnnnnnnnnnnnnnnnnnnnnnnnnnnnnnnnnnnnnnnnnnnnnnnnnnnnnnnnnnnnnnnnnnnnnnnnnnnnnnnnnnnnnnnnnnnnnnnnnnnnnnnnnnnnnnnnnnnnnnnnnnnnnnnnnnnnnnnnnnnnnnnnnnnnnnnnnnnnnnnnnnnnnnnnnnnnnnnnnnnnnnnnnnnnnnnnnnnnnnnnnnnnnnnnnnnnnnnnnnnnnnnnnnnnnnnnnnnnnnnnnnnnnnnnnnnnnnnnnnnnnnnnnnnnnnnnnnnnnnnnnnnnnnnnnnnnnnnnnnnnnnnnnnnnnnnnnnnnnnnnnnnnnnnnnnnnnnnnnnnnnnnnnnnnnnnnnnnnnnnnnnnnnnnnnnnnnnnnnnnnnnnnnnnnnnnnnnnnnnnnnnnnnnnnnnnnnnnnnnnnnnnnnnnnnnnnnnnnnnnnnnnnnnnnnnnnnnnnnnnnnnnnnnnnnnnnnnnnnnnnnnnnnnnnnnnnnnnnnnnnnnnnnnnnnnnnnnnnnnnnnnnnnnnnnnnnnnnnnnnnnnnnnnnnnnnnnnnnnnnnnnnnnnnnnnnnnnnnnnnnnnnnnnnnnnnnnnnnnnnnnnnnnnnnnnnnnnnnnnnnnnnnnnnnnnnnnnnnnnnnnnnnnnnnnnnnnnnnnnnnnnnnnnnnnnnnnnnnnnnnnnnnnnnnnnnnnnnnnnnnnnnnnnnnnnnnnnnnnnnnnnnnnnnnnnnnnnnnnnnnnnnnnnnnnnnnnnnnnnnnnnnnnnnnnnnnnnnnnnnnnnnnnnnnnnnnnnnnnnnnnnnnnnnnnnnnnnnnnnnnnnnnnnnnnnnnnnnnnnnnnnnnnnnnnnnnnnnnnnnnnnnnnnnnnnnnnnnnnnnnnnnnnnnnnnnnnnnnnnnnnnnnnnnnnnnnnnnnnnnnnnnnnnnnnnnnnnnnnnnnnnnnnnnnnnnnnnnnnnnnnnnnnnnnnnnnnnnnnnnnnnnnnnnnnnnnnnnnnnnnnnnnnnnnnnnnnnnnnnnnnnnnnnnnnnnnnnnnnnnnnnnnnnnnnnnnnnnnnnnnnnnnnnnnnnnnnnnnnnnnnnnnnnnnnnnnnnnnnnnnnnnnnnnnnnnnnnnnnnnnnnnnnnnnnnnnnnnnnnnnnnnnnnnnnnnnnnnnnnnnnnnnnnnnnnnnnnnnnnnnnnnnnnnnnnnnnnnnnnnnnnnnnnnnnnnnnnnnnnnnnnnnnnnnnnnnnnnnnnnnnnnnnnnnnnnnnnnnnnnnnnnnnnnnnnnnnnnnnnnnnnnnnnnnnnnnnnnnnnnnnnnnnnnnnnnnnnnnnnnnnnnnnnnnnnnnnnnnnnnnnnnnnnnnnnnnnnnnnnnnnnnnnnnnnnnnnnnnnnnnnnnnnnnnnnnnnnnnnnnnnnnnnnnnnnnnnnnnnnnnnnnnnnnnnnnnnnnnnnnnnnnnnnnnnnnnnnnnnnnnnnnnnnnnnnnnnnnnnnnnnnnnnnnnnnnnnnnnnnnnnnnnnnnnnnnnnnnnnnnnnnnnnnnnnnnnnnnnnnnnnnnnnnnnnnnnnnnnnnnnnnnnnnnnnnnnnnnnnnnnnnnnnnnnnnnnnnnnnnnnnnnnnnnnnnnnnnnnnnnnnnnnnnnnnnnnnnnnnnnnnnnnnnnnnnnnnnnnnnnnnnnnnnnnnnnnnnnnnnnnnnnnnnnnnnnnnnnnnnnnnnnnnnnnnnnnnnnnnnnnnnnnnnnnnnnnnnnnnnnnnnnnnnnnnnnnnnnnnnnnnnnnnnnnnnnnnnnnnnnnnnnnnnnnnnnnnnnnnnnnnnnnnnnnnnnnnnnnnnnnnnnnnnnnnnnnnnnnnnnnnnnnnnnnnnnnnnnnnnnnnnnnnnnnnnnnnnnnnnnnnnnnnnnnnnnnnnnnnnnnnnnnnnnnnnnnnnnnnnnnnnnnnnnnnnnnnnnnnnnnnnnnnnnnnnnnnnnnnnnnnnnnnnnnnnnnnnnnnnnnnnnnnnnnnnnnnnnnnnnnnnnnnnnnnnnnnnnnnnnnnnnnnnnnnnnnnnnnnnnnnnnnnnnnnnnnnnnnnnnnnnnnnnnnnnnnnnnnnnnnnnnnnnnnnnnnnnnnnnnnnnnnnnnnnnnnnnnnnnnnnnnnnnnnnnnnnnnnnnnnnnnnnnnnnnnnnnnnnnnnnnnnnnnnnnnnnnnnnnnnnnnnnnnnnnnnnnnnnnnnnnnnnnnnnnnnnnnnnnnnnnnnnnnnnnnnnnnnnnnnnnnnnnnnnnnnnnnnnnnnnnnnnnnnnnnnnnnnnnnnnnnnnnnnnnnnnnnnnnnnnnnnnnnnnnnnnnnnnnnnnnnnnnnnnnnnnnnnnnnnnnnnnnnnnnnnnnnnnnnnnnnnnnnnnnnnnnnnnnnnnnnnnnnnnnnnnnnnnnnnnnnnnnnnnnnnnnnnnnnnnnnnnnnnnnnnnnnnnnnnnnnnnnnnnnnnnnnnnnnnnnnnnnnnnnnnnnnnnnnnnnnnnnnnnnnnnnnnnnnnnnnnnnnnnnnnnnnnnnnnnnnnnnnnnnnnnnnnnnnnnnnnnnnnnnnnnnnnnnnnnnnnnnnnnnnnnnnnnnnnnnnnnnnnnnnnnnnnnnnnnnnnnnnnnnnnnnnnnnnnnnnnnnnnnnnnnnnnnnnnnnnnnnnnnnnnnnnnnnnnnnnnnnnnnnnnnnnnnnnnnnnnnnnnnnnnnnnnnnnnnnnnnnnnnnnnnnnnnnnnnnnnnnnnnnnnnnnnnnnnnnnnnnnnnnnnnnnnnnnnnnnnnnnnnnnnnnnnnnnnnnnnnnnnnnnnnnnnnnnnnnnnnnnnnnnnnnnnnnnnnnnnnnnnnnnnnnnnnnnnnnnnnnnnnnnnnnnnnnnnnnnnnnnnnnnnnnnnnnnnnnnnnnnnnnnnnnnnnnnnnnnnnnnnnnnnnnnnnnnnnnnnnnnnnnnnnnnnnnnnnnnnnnnnnnnnnnnnnnnnnnnnnnnnnnnnnnnnnnnnnnnnnnnnnnnnnnnnnnnnnnnnnnnnnnnnnnnnnnnnnnnnnnnnnnnnnnnnnnnnnnnnnnnnnnnnnnnnnnnnnnnnnnnnnnnnnnnnnnnnnnnnnnnnnnnnnnnnnnnnnnnnnnnnnnnnnnnnnnnnnnnnnnnnnnnnnnnnnnnnnnnnnnnnnnnnnnnnnnnnnnnnnnnnnnnnnnnnnnnnnnnnnnnnnnnnnnnnnnnnnnnnnnnnnnnnnnnnnnnnnnnnnnnnnnnnnnnnnnnnnnnnnnnnnnnnnnnnnnnnnnnnnnnnnnnnnnnnnnnnnnnnnnnnnnnnnnnnnnnnnnnnnnnnnnnnnnnnnnnnnnnnnnnnnnnnnnnnnnnnnnnnnnnnnnnnnnnnnnnnnnnnnnnnnnnnnnnnnnnnnnnnnnnnnnnnnnnnnnnnnnnnnnnnnnnnnnnnnnnnnnnnnnnnnnnnnnnnnnnnnnnnnnnnnnnnnnnnnnnnnnnnnnnnnnnnnnnnnnnnnnnnnnnnnnnnnnnnnnnnnnnnnnnnnnnnnnnnnnnnnnnnnnnnnnnnnnnnnnnnnnnnnnnnnnnnnnnnnnnnnnnnnnnnnnnnnnnnnnnnnnnnnnnnnnnnnnnnnnnnnnnnnnnnnnnnnnnnnnnnnnnnnnnnnnnnnnnnnnnnnnnnnnnnnnnnnnnnnnnnnnnnnnnnnnnnnnnnnnnnnnnnnnnnnnnnnnnnnnnnnnnnnnnnnnnnnnnnnnnnnnnnnnnnnnnnnnnnnnnnnnnnnnnnnnnnnnnnnnnnnnnnnnnnnnnnnnnnnnnnnnnnnnnnnnnnnnnnnnnnnnnnnnnnnnnnnnnnnnnnnnnnnnnnnnnnnnnnnnnnnnnnnnnnnnnnnnnnnnnnnnnnnnnnnnnnnnnnnnnnnnnnnnnnnnnnnnnnnnnnnnnnnnnnnnnnnnnnnnnnnnnnnnnnnnnnnnnnnnnnnnnnnnnnnnnnnnnnnnnnnnnnnnnnnnnnnnnnnnnnnnnnnnnnnnnnnnnnnnnnnnnnnnnnnnnnnnnnnnnnnnnnnnnnnnnnnnnnnnnnnnnnnnnnnnnnnnnnnnnnnnnnnnnnnnnnnnnnnnnnnnnnnnnnnnnnnnnnnnnnnnnnnnnnnnnnnnnnnnnnnnnnnnnnnnnnnnnnnnnnnnnnnnnnnnnnnnnnnnnnnnnnnnnnnnnnnnnnnnnnnnnnnnnnnnnnnnnnnnnnnnnnnnnnnnnnnnnnnnnnnnnnnnnnnnnnnnnnnnnnnnnnnnnnnnnnnnnnnnnnnnnnnnnnnnnnnnnnnnnnnnnnnnnnnnnnnnnnnnnnnnnnnnnnnnnnnnnnnnnnnnnnnnnnnnnnnnnnnnnnnnnnnnnnnnnnnnnnnnnnnnnnnnnnnnnnnnnnnnnnnnnnnnnnnnnnnnnnnnnnnnnnnnnnnnnnnnnnnnnnnnnnnnnnnnnnnnnnnnnnnnnnnnnnnnnnnnnnnnnnnnnnnnnnnnnnnnnnnnnnnnnnnnnnnnnnnnnnnnnnnnnnnnnnnnnnnnnnnnnnnnnnnnnnnnnnnnnnnnnnnnnnnnnnnnnnnnnnnnnnnnnnnnnnnnnnnnnnnnnnnnnnnnnnnnnnnnnnnnnnnnnnnnnnnnnnnnnnnnnnnnnnnnnnnnnnnnnnnnnnnnnnnnnnnnnnnnnnnnnnnnnnnnnnnnnnnnnnnnnnnnnnnnnnnnnnnnnnnnnnnnnnnnnnnnnnnnnnnnnnnnnnnnnnnnnnnnnnnnnnnnnnnnnnnnnnnnnnnnnnnnnnnnnnnnnnnnnnnnnnnnnnnnnnnnnnnnnnnnnnnnnnnnnnnnnnnnnnnnnnnnnnnnnnnnnnnnnnnnnnnnnnnnnnnnnnnnnnnnnnnnnnnnnnnnnnnnnnnnnnnnnnnnnnnnnnnnnnnnnnnnnnnnnnnnnnnnnnnnnnnnnnnnnnnnnnnnnnnnnnnnnnnnnnnnnnnnnnnnnnnnnnnnnnnnnnnnnnnnnnnnnnnnnnnnnnnnnnnnnnnnnnnnnnnnnnnnnnnnnnnnnnnnnnnnnnnnnnnnnnnnnnnnnnnnnnnnnnnnnnnnnnnnnnnnnnnnnnnnnnnnnnnnnnnnnnnnnnnnnnnnnnnnnnnnnnnnnnnnnnnnnnnnnnnnnnnnnnnnnnnnnnnnnnnnnnnnnnnnnnnnnnnnnnnnnnnnnnnnnnnnnnnnnnnnnnnnnnnnnnnnnnnnnnnnnnnnnnnnnnnnnnnnnnnnnnnnnnnnnnnnnnnnnnnnnnnnnnnnnnnnnnnnnnnnnnnnnnnnnnnnnnnnnnnnnnnnnnnnnnnnnnnnnnnnnnnnnnnnnnnnnnnnnnnnnnnnnnnnnnnnnnnnnnnnnnnnnnnnnnnnnnnnnnnnnnnnnnnnnnnnnnnnnnnnnnnnnnnnnnnnnnnnnnnnnnnnnnnnnnnnnnnnnnnnnnnnnnnnnnnnnnnnnnnnnnnnnnnnnnnnnnnnnnnnnnnnnnnnnnnnnnnnnnnnnnnnnnnnnnnnnnnnnnnnnnnnnnnnnnnnnnnnnnnnnnnnnnnnnnnnnnnnnnnnnnnnnnnnnnnnnnnnnnnnnnnnnnnnnnnnnnnnnnnnnnnnnnnnnnnnnnnnnnnnnnnnnnnnnnnnnnnnnnnnnnnnnnnnnnnnnnnnnnnnnnnnnnnnnnnnnnnnnnnnnnnnnnnnnnnnnnnnnnnnnnnnnnnnnnnnnnnnnnnnnnnnnnnnnnnnnnnnnnnnnnnnnnnnnnnnnnnnnnnnnnnnnnnnnnnnnnnnnnnnnnnnnnnnnnnnnnnnnnnnnnnnnnnnnnnnnnnnnnnnnnnnnnnnnnnnnnnnnnnnnnnnnnnnnnnnnnnnnnnnnnnnnnnnnnnnnnnnnnnnnnnnnnnnnnnnnnnnnnnnnnnnnnnnnnnnnnnnnnnnnnnnnnnnnnnnnnnnnnnnnnnnnnnnnnnnnnnnnnnnnnnnnnnnnnnnnnnnnnnnnnnnnnnnnnnnnnnnnnnnnnnnnnnnnnnnnnnnnnnnnnnnnnnnnnnnnnnnnnnnnnnnnnnnnnnnnnnnnnnnnnnnnnnnnnnnnnnnnnnnnnnnnnnnnnnnnnnnnnnnnnnnnnnnnnnnnnnnnnnnnnnnnnnnnnnnnnnnnnnnnnnnnnnnnnnnnnnnnnnnnnnnnnnnnnnnnnnnnnnnnnnnnnnnnnnnnnnnnnnnnnnnnnnnnnnnnnnnnnnnnnnnnnnnnnnnnnnnnnnnnnnnnnnnnnnnnnnnnnnnnnnnnnnnnnnnnnnnnnnnnnnnnnnnnnnnnnnnnnnnnnnnnnnnnnnnnnnnnnnnnnnnnnnnnnnnnnnnnnnnnnnnnnnnnnnnnnnnnnnnnnnnnnnnnnnnnnnnnnnnnnnnnnnnnnnnnnnnnnnnnnnnnnnnnnnnnnnnnnnnnnnnnnnnnnnnnnnnnnnnnnnnnnnnnnnnnnnnnnnnnnnnnnnnnnnnnnnnnnnnnnnnnnnnnnnnnnnnnnnnnnnnnnnnnnnnnnnnnnnnnnnnnnnnnnnnnnnnnnnnnnnnnnnnnnnnnnnnnnnnnnnnnnnnnnnnnnnnnnnnnnnnnnnnnnnnnnnnnnnnnnnnnnnnnnnnnnnnnnnnnnnnnnnnnnnnnnnnnnnnnnnnnnnnnnnnnnnnnnnnnnnnnnnnnnnnnnnnnnnnnnnnnnnnnnnnnnnnnnnnnnnnnnnnnnnnnnnnnnnnnnnnnnnnnnnnnnnnnnnnnnnnnnnnnnnnnnnnnnnnnnnnnnnnnnnnnnnnnnnnnnnnnnnnnnnnnnnnnnnnnnnnnnnnnnnnnnnnnnnnnnnnnnnnnnnnnnnnnnnnnnnnnnnnnnnnnnnnnnnnnnnnnnnnnnnnnnnnnnnnnnnnnnnnnnnnnnnnnnnnnnnnnnnnnnnnnnnnnnnnnnnnnnnnnnnnnnnnnnnnnnnnnnnnnnnnnnnnnnnnnnnnnnnnnnnnnnnnnnnnnnnnnnnnnnnnnnnnnnnnnnnnnnnnnnnnnnnnnnnnnnnnnnnnnnnnnnnnnnnnnnnnnnnnnnnnnnnnnnnnnnnnnnnnnnnnnnnnnnnnnnnnnnnnnnnnnnnnnnnnnnnnnnnnnnnnnnnnnnnnnnnnnnnnnnnnnnnnnnnnnnnnnnnnnnnnnnnnnnnnnnnnnnnnnnnnnnnnnnnnnnnnnnnnnnnnnnnnnnnnnnnnnnnnnnnnnnnnnnnnnnnnnnnnnnnnnnnnnnnnnnnnnnnnnnnnnnnnnnnnnnnnnnnnnnnnnnnnnnnnnnnnnnnnnnnnnnnnnnnnnnnnnnnnnnnnnnnnnnnnnnnnnnnnnnnnnnnnnnnnnnnnnnnnnnnnnnnnnnnnnnnnnnnnnnnnnnnnnnnnnnnnnnnnnnnnnnnnnnnnnnnnnnnnnnnnnnnnnnnnnnnnnnnnnnnnnnnnnnnnnnnnnnnnnnnnnnnnnnnnnnnnnnnnnnnnnnnnnnnnnnnnnnnnnnnnnnnnnnnnnnnnnnnnnnnnnnnnnnnnnnnnnnnnnnnnnnnnnnnnnnnnnnnnnnnnnnnnnnnnnnnnnnnnnnnnnnnnnnnnnnnnnnnnnnnnnnnnnnnnnnnnnnnnnnnnnnnnnnnnnnnnnnnnnnnnnnnnnnnnnnnnnnnnnnnnnnnnnnnnnnnnnnnnnnnnnnnnnnnnnnnnnnnnnnnnnnnnnnnnnnnnnnnnnnnnnnnnnnnnnnnnnnnnnnnnnnnnnnnnnnnnnnnnnnnnnnnnnnnnnnnnnnnnnnnnnnnnnnnnnnnnnnnnnnnnnnnnnnnnnnnnnnnnnnnnnnnnnnnnnnnnnnnnnnnnnnnnnnnnnnnnnnnnnnnnnnnnnnnnnnnnnnnnnnnnnnnnnnnnnnnnnnnnnnnnnnnnnnnnnnnnnnnnnnnnnnnnnnnnnnnnnnnnnnnnnnnnnnnnnnnnnnnnnnnnnnnnnnnnnnnnnnnnnnnnnnnnnnnnnnnnnnnnnnnnnnnnnnnnnnnnnnnnnnnnnnnnnnnnnnnnnnnnnnnnnnnnnnnnnnnnnnnnnnnnnnnnnnnnnnnnnnnnnnnnnnnnnnnnnnnnnnnnnnnnnnnnnnnnnnnnnnnnnnnnnnnnnnnnnnnnnnnnnnnnnnnnnnnnnnnnnnnnnnnnnnnnnnnnnnnnnnnnnnnnnnnnnnnnnnnnnnnnnnnnnnnnnnnnnnnnnnnnnnnnnnnnnnnnnnnnnnnnnnnnnnnnnnnnnnnnnnnnnnnnnnnnnnnnnnnnnnnnnnnnnnnnnnnnnnnnnnnnnnnnnnnnnnnnnnnnnnnnnnnnnnnnnnnnnnnnnnnnnnnnnnnnnnnnnnnnnnnnnnnnnnnnnnnnnnnnnnnnnnnnnnnnnnnnnnnnnnnnnnnnnnnnnnnnnnnnnnnnnnnnnnnnnnnnnnnnnnnnnnnnnnnnnnnnnnnnnnnnnnnnnnnnnnnnnnnnnnnnnnnnnnnnnnnnnnnnnnnnnnnnnnnnnnnnnnnnnnnnnnnnnnnnnnnnnnnnnnnnnnnnnnnnnnnnnnnnnnnnnnnnnnnnnnnnnnnnnnnnnnnnnnnnnnnnnnnnnnnnnnnnnnnnnnnnnnnnnnnnnnnnnnnnnnnnnnnnnnnnnnnnnnnnnnnnnnnnnnnnnnnnnnnnnnnnnnnnnnnnnnnnnnnnnnnnnnnnnnnnnnnnnnnnnnnnnnnnnnnnnnnnnnnnnnnnnnnnnnnnnnnnnnnnnnnnnnnnnnnnnnnnnnnnnnnnnnnnnnnnnnnnnnnnnnnnnnnnnnnnnnnnnnnnnnnnnnnnnnnnnnnnnnnnnnnnnnnnnnnnnnnnnnnnnnnnnnnnnnnnnnnnnnnnnnnnnnnnnnnnnnnnnnnnnnnnnnnnnnnnnnnnnnnnnnnnnnnnnnnnnnnnnnnnnnnnnnnnnnnnnnnnnnnnnnnnnnnnnnnnnnnnnnnnnnnnnnnnnnnnnnnnnnnnnnnnnnnnnnnnnnnnnnnnnnnnnnnnnnnnnnnnnnnnnnnnnnnnnnnnnnnnnnnnnnnnnnnnnnnnnnnnnnnnnnnnnnnnnnnnnnnnnnnnnnnnnnnnnnnnnnnnnnnnnnnnnnnnnnnnnnnnnnnnnnnnnnnnnnnnnnnnnnnnnnnnnnnnnnnnnnnnnnnnnnnnnnnnnnnnnnnnnnnnnnnnnnnnnnnnnnnnnnnnnnnnnnnnnnnnnnnnnnnnnnnnnnnnnnnnnnnnnnnnnnnnnnnnnnnnnnnnnnnnnnnnnnnnnnnnnnnnnnnnnnnnnnnnnnnnnnnnnnnnnnnnnnnnnnnnnnnnnnnnnnnnnnnnnnnnnnnnnnnnnnnnnnnnnnnnnnnnnnnnnnnnnnnnnnnnnnnnnnnnnnnnnnnnnnnnnnnnnnnnnnnnnnnnnnnnnnnnnnnnnnnnnnnnnnnnnnnnnnnnnnnnnnnnnnnnnnnnnnnnnnnnnnnnnnnnnnnnnnnnnnnnnnnnnnnnnnnnnnnnnnnnnnnnnnnnnnnnnnnnnnnnnnnnnnnnnnnnnnnnnnnnnnnnnnnnnnnnnnnnnnnnnnnnnnnnnnnnnnnnnnnnnnnnnnnnnnnnnnnnnnnnnnnnnnnnnnnnnnnnnnnnnnnnnnnnnnnnnnnnnnnnnnnnnnnnnnnnnnnnnnnnnnnnnnnnnnnnnnnnnnnnnnnnnnnnnnnnnnnnnnnnnnnnnnnnnnnnnnnnnnnnnnnnnnnnnnnnnnnnnnnnnnnnnnnnnnnnnnnnnnnnnnnnnnnnnnnnnnnnnnnnnnnnnnnnnnnnnnnnnnnnnnnnnnnnnnnnnnnnnnnnnnnnnnnnnnnnnnnnnnnnnnnnnnnnnnnnnnnnnnnnnnnnnnnnnnnnnnnnnnnnnnnnnnnnnnnnnnnnnnnnnnnnnnnnnnnnnnnnnnnnnnnnnnnnnnnnnnnnnnnnnnnnnnnnnnnnnnnnnnnnnnnnnnnnnnnnnnnnnnnnnnnnnnnnnnnnnnnnnnnnnnnnnnnnnnnnnnnnnnnnnnnnnnnnnnnnnnnnnnnnnnnnnnnnnnnnnnnnnnnnnnnnnnnnnnnnnnnnnnnnnnnnnnnnnnnnnnnnnnnnnnnnnnnnnnnnnnnnnnnnnnnnnnnnnnnnnnnnnnnnnnnnnnnnnnnnnnnnnnnnnnnnnnnnnnnnnnnnnnnnnnnnnnnnnnnnnnnnnnnnnnnnnnnnnnnnnnnnnnnnnnnnnnnnnnnnnnnnnnnnnnnnnnnnnnnnnnnnnnnnnnnnnnnnnnnnnnnnnnnnnnnnnnnnnnnnnnnnnnnnnnnnnnnnnnnnnnnnnnnnnnnnnnnnnnnnnnnnnnnnnnnnnnnnnnnnnnnnnnnnnnnnnnnnnnnnnnnnnnnnnnnnnnnnnnnnnnnnnnnnnnnnnnnnnnnnnnnnnnnnnnnnnnnnnnnnnnnnnnnnnnnnnnnnnnnnnnnnnnnnnnnnnnnnnnnnnnnnnnnnnnnnnnnnnnnnnnnnnnnnnnnnnnnnnnnnnnnnnnnnnnnnnnnnnnnnnnnnnnnnnnnnnnnnnnnnnnnnnnnnnnnnnnnnnnnnnnnnnnnnnnnnnnnnnnnnnnnnnnnnnnnnnnnnnnnnnnnnnnnnnnnnnnnnnnnnnnnnnnnnnnnnnnnnnnnnnnnnnnnnnnnnnnnnnnnnnnnnnnnnnnnnnnnnnnnnnnnnnnnnnnnnnnnnnnnnnnnnnnnnnnnnnnnnnnnnnnnnnnnnnnnnnnnnnnnnnnnnnnnnnnnnnnnnnnnnnnnnnnnnnnnnnnnnnnnnnnnnnnnnnnnnnnnnnnnnnnnnnnnnnnnnnnnnnnnnnnnnnnnnnnnnnnnnnnnnnnnnnnnnnnnnnnnnnnnnnnnnnnnnnnnnnnnnnnnnnnnnnnnnnnnnnnnnnnnnnnnnnnnnnnnnnnnnnnnnnnnnnnnnnnnnnnnnnnnnnnnnnnnnnnnnnnnnnnnnnnnnnnnnnnnnnnnnnnnnnnnnnnnnnnnnnnnnnnnnnnnnnnnnnnnnnnnnnnnnnnnnnnnnnnnnnnnnnnnnnnnnnnnnnnnnnnnnnnnnnnnnnnnnnnnnnnnnnnnnnnnnnnnnnnnnnnnnnnnnnnnnnnnnnnnnnnnnnnnnnnnnnnnnnnnnnnnnnnnnnnnnnnnnnnnnnnnnnnnnnnnnnnnnnnnnnnnnnnnnnnnnnnnnnnnnnnnnnnnnnnnnnnnnnnnnnnnnnnnnnnnnnnnnnnnnnnnnnnnnnnnnnnnnnnnnnnnnnnnnnnnnnnnnnnnnnnnnnnnnnnnnnnnnnnnnnnnnnnnnnnnnnnnnnnnnnnnnnnnnnnnnnnnnnnnnnnnnnnnnnnnnnnnnnnnnnnnnnnnnnnnnnnnnnnnnnnnnnnnnnnnnnnnnnnnnnnnnnnnnnnnnnnnnnnnnnnnnnnnnnnnnnnnnnnnnnnnnnnnnnnnnnnnnnnnnnnnnnnnnnnnnnnnnnnnnnnnnnnnnnnnnnnnnnnnnnnnnnnnnnnnnnnnnnnnnnnnnnnnnnnnnnnnnnnnnnnnnnnnnnnnnnnnnnnnnnnnnnnnnnnnnnnnnnnnnnnnnnnnnnnnnnnnnnnnnnnnnnnnnnnnnnnnnnnnnnnnnnnnnnnnnnnnnnnnnnnnnnnnnnnnnnnnnnnnnnnnnnnnnnnnnnnnnnnnnnnnnnnnnnnnnnnnnnnnnnnnnnnnnnnnnnnnnnnnnnnnnnnnnnnnnnnnnnnnnnnnnnnnnnnnnnnnnnnnnnnnnnnnnnnnnnnnnnnnnnnnnnnnnnnnnnnnnnnnnnnnnnnnnnnnnnnnnnnnnnnnnnnnnnnnnnnnnnnnnnnnnnnnnnnnnnnnnnnnnnnnnnnnnnnnnnnnnnnnnnnnnnnnnnnnnnnnnnnnnnnnnnnnnnnnnnnnnnnnnnnnnnnnnnnnnnnnnnnnnnnnnnnnnnnnnnnnnnnnnnnnnnnnnnnnnnnnnnnnnnnnnnnnnnnnnnnnnnnnnnnnnnnnnnnnnnnnnnnnnnnnnnnnnnnnnnnnnnnnnnnnnnnnnnnnnnnnnnnnnnnnnnnnnnnnnnnnnnnnnnnnnnnnnnnnnnnnnnnnnnnnnnnnnnnnnnnnnnnnnnnnnnnnnnnnnnnnnnnnnnnnnnnnnnnnnnnnnnnnnnnnnnnnnnnnnnnnnnnnnnnnnnnnnnnnnnnnnnnnnnnnnnnnnnnnnnnnnnnnnnnnnnnnnnnnnnnnnnnnnnnnnnnnnnnnnnnnnnnnnnnnnnnnnnnnnnnnnnnnnnnnnnnnnnnnnnnnnnnnnnnnnnnnnnnnnnnnnnnnnnnnnnnnnnnnnnnnnnnnnnnnnnnnnnnnnnnnnnnnnnnnnnnnnnnnnnnnnnnnnnnnnnnnnnnnnnnnnnnnnnnnnnnnnnnnnnnnnnnnnnnnnnnnnnnnnnnnnnnnnnnnnnnnnnnnnnnnnnnnnnnnnnnnnnnnnnnnnnnnnnnnnnnnnnnnnnnnnnnnnnnnnnnnnnnnnnnnnnnnnnnnnnnnnnnnnnnnnnnnnnnnnnnnnnnnnnnnnnnnnnnnnnnnnnnnnnnnnnnnnnnnnnnnnnnnnnnnnnnnnnnnnnnnnnnnnnnnnnnnnnnnnnnnnnnnnnnnnnnnnnnnnnnnnnnnnnnnnnnnnnnnnnnnnnnnnnnnnnnnnnnnnnnnnnnnnnnnnnnnnnnnnnnnnnnnnnnnnnnnnnnnnnnnnnnnnnnnnnnnnnnnnnnnnnnnnnnnnnnnnnnnnnnnnnnnnnnnnnnnnnnnnnnnnnnnnnnnnnnnnnnnnnnnnnnnnnnnnnnnnnnnnnnnnnnnnnnnnnnnnnnnnnnnnnnnnnnnnnnnnnnnnnnnnnnnnnnnnnnnnnnnnnnnnnnnnnnnnnnnnnnnnnnnnnnnnnnnnnnnnnnnnnnnnnnnnnnnnnnnnnnnnnnnnnnnnnnnnnnnnnnnnnnnnnnnnnnnnnnnnnnnnnnnnnnnnnnnnnnnnnnnnnnnnnnnnnnnnnnnnnnnnnnnnnnnnnnnnnnnnnnnnnnnnnnnnnnnnnnnnnnnnnnnnnnnnnnnnnnnnnnnnnnnnnnnnnnnnnnnnnnnnnnnnnnnnnnnnnnnnnnnnnnnnnnnnnnnnnnnnnnnnnnnnnnnnnnnnnnnnnnnnnnnnnnnnnnnnnnnnnnnnnnnnnnnnnnnnnnnnnnnnnnnnnnnnnnnnnnnnnnnnnnnnnnnnnnnnnnnnnnnnnnnnnnnnnnnnnnnnnnnnnnnnnnnnnnnnnnnnnnnnnnnnnnnnnnnnnnnnnnnnnnnnnnnnnnnnnnnnnnnnnnnnnnnnnnnnnnnnnnnnnnnnnnnnnnnnnnnnnnnnnnnnnnnnnnnnnnnnnnnnnnnnnnnnnnnnnnnnnnnnnnnnnnnnnnnnnnnnnnnnnnnnnnnnnnnnnnnnnnnnnnnnnnnnnnnnnnnnnnnnnnnnnnnnnnnnnnnnnnnnnnnnnnnnnnnnnnnnnnnnnnnnnnnnnnnnnnnnnnnnnnnnnnnnnnnnnnnnnnnnnnnnnnnnnnnnnnnnnnnnnnnnnnnnnnnnnnnnnnnnnnnnnnnnnnnnnnnnnnnnnnnnnnnnnnnnnnnnnnnnnnnnnnnnnnnnnnnnnnnnnnnnnnnnnnnnnnnnnnnnnnnnnnnnnnnnnnnnnnnnnnnnnnnnnnnnnnnnnnnnnnnnnnnnnnnnnnnnnnnnnnnnnnnnnnnnnnnnnnnnnnnnnnnnnnnnnnnnnnnnnnnnnnnnnnnnnnnnnnnnnnnnnnnnnnnnnnnnnnnnnnnnnnnnnnnnnnnnnnnnnnnnnnnnnnnnnnnnnnnnnnnnnnnnnnnnnnnnnnnnnnnnnnnnnnnnnnnnnnnnnnnnnnnnnnnnnnnnnnnnnnnnnnnnnnnnnnnnnnnnnnnnnnnnnnnnnnnnnnnnnnnnnnnnnnnnnnnnnnnnnnnnnnnnnnnnnnnnnnnnnnnnnnnnnnnnnnnnnnnnnnnnnnnnnnnnnnnnnnnnnnnnnnnnnnnnnnnnnnnnnnnnnnnnnnnnnnnnnnnnnnnnnnnnnnnnnnnnnnnnnnnnnnnnnnnnnnnnnnnnnnnnnnnnnnnnnnnnnnnnnnnnnnnnnnnnnnnnnnnnnnnnnnnnnnnnnnnnnnnnnnnnnnnnnnnnnnnnnnnnnnnnnnnnnnnnnnnnnnnnnnnnnnnnnnnnnnnnnnnnnnnnnnnnnnnnnnnnnnnnnnnnnnnnnnnnnnnnnnnnnnnnnnnnnnnnnnnnnnnnnnnnnnnnnnnnnnnnnnnnnnnnnnnnnnnnnnnnnnnnnnnnnnnnnnnnnnnnnnnnnnnnnnnnnnnnnnnnnnnnnnnnnnnnnnnnnnnnnnnnnnnnnnnnnnnnnnnnnnnnnnnnnnnnnnnnnnnnnnnnnnnnnnnnnnnnnnnnnnnnnnnnnnnnnnnnnnnnnnnnnnnnnnnnnnnnnnnnnnnnnnnnnnnnnnnnnnnnnnnnnnnnnnnnnnnnnnnnnnnnnnnnnnnnnnnnnnnnnnnnnnnnnnnnnnnnnnnnnnnnnnnnnnnnnnnnnnnnnnnnnnnnnnnnnnnnnnnnnnnnnnnnnnnnnnnnnnnnnnnnnnnnnnnnnnnnnnnnnnnnnnnnnnnnnnnnnnnnnnnnnnnnnnnnnnnnnnnnnnnnnnnnnnnnnnnnnnnnnnnnnnnnnnnnnnnnnnnnnnnnnnnnnnnnnnnnnnnnnnnnnnnnnnnnnnnnnnnnnnnnnnnnnnnnnnnnnnnnnnnnnnnnnnnnnnnnnnnnnnnnnnnnnnnnnnnnnnnnnnnnnnnnnnnnnnnnnnnnnnnnnnnnnnnnnnnnnnnnnnnnnnnnnnnnnnnnnnnnnnnnnnnnnnnnnnnnnnnnnnnnnnnnnnnnnnnnnnnnnnnnnnnnnnnnnnnnnnnnnnnnnnnnnnnnnnnnnnnnnnnnnnnnnnnnnnnnnnnnnnnnnnnnnnnnnnnnnnnnnnnnnnnnnnnnnnnnnnnnnnnnnnnnnnnnnnnnnnnnnnnnnnnnnnnnnnnnnnnnnnnnnnnnnnnnnnnnnnnnnnnnnnnnnnnnnnnnnnnnnnnnnnnnnnnnnnnnnnnnnnnnnnnnnnnnnnnnnnnnnnnnnnnnnnnnnnnnnnnnnnnnnnnnnnnnnnnnnnnnnnnnnnnnnnnnnnnnnnnnnnnnnnnnnnnnnnnnnnnnnnnnnnnnnnnnnnnnnnnnnnnnnnnnnnnnnnnnnnnnnnnnnnnnnnnnnnnnnnnnnnnnnnnnnnnnnnnnnnnnnnnnnnnnnnnnnnnnnnnnnnnnnnnnnnnnnnnnnnnnnnnnnnnnnnnnnnnnnnnnnnnnnnnnnnnnnnnnnnnnnnnnnnnnnnnnnnnnnnnnnnnnnnnnnnnnnnnnnnnnnnnnnnnnnnnnnnnnnnnnnnnnnnnnnnnnnnnnnnnnnnnnnnnnnnnnnnnnnnnnnnnnnnnnnnnnnnnnnnnnnnnnnnnnnnnnnnnnnnnnnnnnnnnnnnnnnnnnnnnnnnnnnnnnnnnnnnnnnnnnnnnnnnnnnnnnnnnnnnnnnnnnnnnnnnnnnnnnnnnnnnnnnnnnnnnnnnnnnnnnnnnnnnnnnnnnnnnnnnnnnnnnnnnnnnnnnnnnnnnnnnnnnnnnnnnnnnnnnnnnnnnnnnnnnnnnnnnnnnnnnnnnnnnnnnnnnnnnnnnnnnnnnnnnnnnnnnnnnnnnnnnnnnnnnnnnnnnnnnnnnnnnnnnnnnnnnnnnnnnnnnnnnnnnnnnnnnnnnnnnnnnnnnnnnnnnnnnnnnnnnnnnnnnnnnnnnnnnnnnnnnnnnnnnnnnnnnnnnnnnnnnnnnnnnnnnnnnnnnnnnnnnnnnnnnnnnnnnnnnnnnnnnnnnnnnnnnnnnnnnnnnnnnnnnnnnnnnnnnnnnnnnnnnnnnnnnnnnnnnnnnnnnnnnnnnnnnnnnnnnnnnnnnnnnnnnnnnnnnnnnnnnnnnnnnnnnnnnnnnnnnnnnnnnnnnnnnnnnnnnnnnnnnnnnnnnnnnnnnnnnnnnnnnnnnnnnnnnnnnnnnnnnnnnnnnnnnnnnnnnnnnnnnnnnnnnnnnnnnnnnnnnnnnnnnnnnnnnnnnnnnnnnnnnnnnnnnnnnnnnnnnnnnnnnnnnnnnnnnnnnnnnnnnnnnnnnnnnnnnnnnnnnnnnnnnnnnnnnnnnnnnnnnnnnnnnnnnnnnnnnnnnnnnnnnnnnnnnnnnnnnnnnnnnnnnnnnnnnnnnnnnnnnnnnnnnnnnnnnnnnnnnnnnnnnnnnnnnnnnnnnnnnnnnnnnnnnnnnnnnnnnnnnnnnnnnnnnnnnnnnnnnnnnnnnnnnnnnnnnnnnnnnnnnnnnnnnnnnnnnnnnnnnnnnnnnnnnnnnnnnnnnnnnnnnnnnnnnnnnnnnnnnnnnnnnnnnnnnnnnnnnnnnnnnnnnnnnnnnnnnnnnnnnnnnnnnnnnnnnnnnnnnnnnnnnnnnnnnnnnnnnnnnnnnnnnnnnnnnnnnnnnnnnnnnnnnnnnnnnnnnnnnnnnnnnnnnnnnnnnnnnnnnnnnnnnnnnnnnnnnnnnnnnnnnnnnnnnnnnnnnnnnnnnnnnnnnnnnnnnnnnnnnnnnnnnnnnnnnnnnnnnnnnnnnnnnnnnnnnnnnnnnnnnnnnnnnnnnnnnnnnnnnnnnnnnnnnnnnnnnnnnnnnnnnnnnnnnnnnnnnnnnnnnnnnnnnnnnnnnnnnnnnnnnnnnnnnnnnnnnnnnnnnnnnnnnnnnnnnnnnnnnnnnnnnnnnnnnnnnnnnnnnnnnnnnnnnnnnnnnnnnnnnnnnnnnnnnnnnnnnnnnnnnnnnnnnnnnnnnnnnnnnnnnnnnnnnnnnnnnnnnnnnnnnnnnnnnnnnnnnnnnnnnnnnnnnnnnnnnnnnnnnnnnnnnnnnnnnnnnnnnnnnnnnnnnnnnnnnnnnnnnnnnnnnnnnnnnnnnnnnnnnnnnnnnnnnnnnnnnnnnnnnnnnnnnnnnnnnnnnnnnnnnnnnnnnnnnnnnnnnnnnnnnnnnnnnnnnnnnnnnnnnnnnnnnnnnnnnnnnnnnnnnnnnnnnnnnnnnnnnnnnnnnnnnnnnnnnnnnnnnnnnnnnnnnnnnnnnnnnnnnnnnnnnnnnnnnnnnnnnnnnnnnnnnnnnnnnnnnnnnnnnnnnnnnnnnnnnnnnnnnnnnnnnnnnnnnnnnnnnnnnnnnnnnnnnnnnnnnnnnnnnnnnnnnnnnnnnnnnnnnnnnnnnnnnnnnnnnnnnnnnnnnnnnnnnnnnnnnnnnnnnnnnnnnnnnnnnnnnnnnnnnnnnnnnnnnnnnnnnnnnnnnnnnnnnnnnnnnnnnnnnnnnnnnnnnnnnnnnnnnnnnnnnnnnnnnnnnnnnnnnnnnnnnnnnnnnnnnnnnnnnnnnnnnnnnnnnnnnnnnnnnnnnnnnnnnnnnnnnnnnnnnnnnnnnnnnnnnnnnnnnnnnnnnnnnnnnnnnnnnnnnnnnnnnnnnnnnnnnnnnnnnnnnnnnnnnnnnnnnnnnnnnnnnnnnnnnnnnnnnnnnnnnnnnnnnnnnnnnnnnnnnnnnnnnnnnnnnnnnnnnnnnnnnnnnnnnnnnnnnnnnnnnnnnnnnnnnnnnnnnnnnnnnnnnnnnnnnnnnnnnnnnnnnnnnnnnnnnnnnnnnnnnnnnnnnnnnnnnnnnnnnnnnnnnnnnnnnnnnnnnnnnnnnnnnnnnnnnnnnnnnnnnnnnnnnnnnnnnnnnnnnnnnnnnnnnnnnnnnnnnnnnnnnnnnnnnnnnnnnnnnnnnnnnnnnnnnnnnnnnnnnnnnnnnnnnnnnnnnnnnnnnnnnnnnnnnnnnnnnnnnnnnnnnnnnnnnnnnnnnnnnnnnnnnnnnnnnnnnnnnnnnnnnnnnnnnnnnnnnnnnnnnnnnnnnnnnnnnnnnnnnnnnnnnnnnnnnnnnnnnnnnnnnnnnnnnnnnnnnnnnnnnnnnnnnnnnnnnnnnnnnnnnnnnnnnnnnnnnnnnnnnnnnnnnnnnnnnnnnnnnnnnnnnnnnnnnnnnnnnnnnnnnnnnnnnnnnnnnnnnnnnnnnnnnnnnnnnnnnnnnnnnnnnnnnnnnnnnnnnnnnnnnnnnnnnnnnnnnnnnnnnnnnnnnnnnnnnnnnnnnnnnnnnnnnnnnnnnnnnnnnnnnnnnnnnnnnnnnnnnnnnnnnnnnnnnnnnnnnnnnnnnnnnnnnnnnnnnnnnnnnnnnnnnnnnnnnnnnnnnnnnnnnnnnnnnnnnnnnnnnnnnnnnnnnnnnnnnnnnnnnnnnnnnnnnnnnnnnnnnnnnnnnnnnnnnnnnnnnnnnnnnnnnnnnnnnnnnnnnnnnnnnnnnnnnnnnnnnnnnnnnnnnnnnnnnnnnnnnnnnnnnnnnnnnnnnnnnnnnnnnnnnnnnnnnnnnnnnnnnnnnnnnnnnnnnnnnnnnnnnnnnnnnnnnnnnnnnnnnnnnnnnnnnnnnnnnnnnnnnnnnnnnnnnnnnnnnnnnnnnnnnnnnnnnnnnnnnnnnnnnnnnnnnnnnnnnnnnnnnnnnnnnnnnnnnnnnnnnnnnnnnnnnnnnnnnnnnnnnnnnnnnnnnnnnnnnnnnnnnnnnnnnnnnnnnnnnnnnnnnnnnnnnnnnnnnnnnnnnnnnnnnnnnnnnnnnnnnnnnnnnnnnnnnnnnnnnnnnnnnnnnnnnnnnnnnnnnnnnnnnnnnnnnnnnnnnnnnnnnnnnnnnnnnnnnnnnnnnnnnnnnnnnnnnnnnnnnnnnnnnnnnnnnnnnnnnnnnnnnnnnnnnnnnnnnnnnnnnnnnnnnnnnnnnnnnnnnnnnnnnnnnnnnnnnnnnnnnnnnnnnnnnnnnnnnnnnnnnnnnnnnnnnnnnnnnnnnnnnnnnnnnnnnnnnnnnnnnnnnnnnnnnnnnnnnnnnnnnnnnnnnnnnnnnnnnnnnnnnnnnnnnnnnnnnnnnnnnnnnnnnnnnnnnnnnnnnnnnnnnnnnnnnnnnnnnnnnnnnnnnnnnnnnnnnnnnnnnnnnnnnnnnnnnnnnnnnnnnnnnnnnnnnnnnnnnnnnnnnnnnnnnnnnnnnnnnnnnnnnnnnnnnnnnnnnnnnnnnnnnnnnnnnnnnnnnnnnnnnnnnnnnnnnnnnnnnnnnnnnnnnnnnnnnnnnnnnnnnnnnnnnnnnnnnnnnnnnnnnnnnnnnnnnnnnnnnnnnnnnnnnnnnnnnnnnnnnnnnnnnnnnnnnnnnnnnnnnnnnnnnnnnnnnnnnnnnnnnnnnnnnnnnnnnnnnnnnnnnnnnnnnnnnnnnnnnnnnnnnnnnnnnnnnnnnnnnnnnnnnnnnnnnnnnnnnnnnnnnnnnnnnnnnnnnnnnnnnnnnnnnnnnnnnnnnnnnnnnnnnnnnnnnnnnnnnnnnnnnnnnnnnnnnnnnnnnnnnnnnnnnnnnnnnnnnnnnnnnnnnnnnnnnnnnnnnnnnnnnnnnnnnnnnnnnnnnnnnnnnnnnnnnnnnnnnnnnnnnnnnnnnnnnnnnnnnnnnnnnnnnnnnnnnnnnnnnnnnnnnnnnnnnnnnnnnnnnnnnnnnnnnnnnnnnnnnnnnnnnnnnnnnnnnnnnnnnnnnnnnnnnnnnnnnnnnnnnnnnnnnnnnnnnnnnnnnnnnnnnnnnnnnnnnnnnnnnnnnnnnnnnnnnnnnnnnnnnnnnnnnnnnnnnnnnnnnnnnnnnnnnnnnnnnnnnnnnnnnnnnnnnnnnnnnnnnnnnnnnnnnnnnnnnnnnnnnnnnnnnnnnnnnnnnnnnnnnnnnnnnnnnnnnnnnnnnnnnnnnnnnnnnnnnnnnnnnnnnnnnnnnnnnnnnnnnnnnnnnnnnnnnnnnnnnnnnnnnnnnnnnnnnnnnnnnnnnnnnnnnnnnnnnnnnnnnnnnnnnnnnnnnnnnnnnnnnnnnnnnnnnnnnnnnnnnnnnnnnnnnnnnnnnnnnnnnnnnnnnnnnnnnnnnnnnnnnnnnnnnnnnnnnnnnnnnnnnnnnnnnnnnnnnnnnnnnnnnnnnnnnnnnnnnnnnnnnnnnnnnnnnnnnnnnnnnnnnnnnnnnnnnnnnnnnnnnnnnnnnnnnnnnnnnnnnnnnnnnnnnnnnnnnnnnnnnnnnnnnnnnnnnnnnnnnnnnnnnnnnnnnnnnnnnnnnnnnnnnnnnnnnnnnnnnnnnnnnnnnnnnnnnnnnnnnnnnnnnnnnnnnnnnnnnnnnnnnnnnnnnnnnnnnnnnnnnnnnnnnnnnnnnnnnnnnnnnnnnnnnnnnnnnnnnnnnnnnnnnnnnnnnnnnnnnnnnnnnnnnnnnnnnnnnnnnnnnnnnnnnnnnnnnnnnnnnnnnnnnnnnnnnnnnnnnnnnnnnnnnnnnnnnnnnnnnnnnnnnnnnnnnnnnnnnnnnnnnnnnnnnnnnnnnnnnnnnnnnnnnnnnnnnnnnnnnnnnnnnnnnnnnnnnnnnnnnnnnnnnnnnnnnnnnnnnnnnnnnnnnnnnnnnnnnnnnnnnnnnnnnnnnnnnnnnnnnnnnnnnnnnnnnnnnnnnnnnnnnnnnnnnnnnnnnnnnnnnnnnnnnnnnnnnnnnnnnnnnnnnnnnnnnnnnnnnnnnnnnnnnnnnnnnnnnnnnnnnnnnnnnnnnnnnnnnnnnnnnnnnnnnnnnnnnnnnnnnnnnnnnnnnnnnnnnnnnnnnnnnnnnnnnnnnnnnnnnnnnnnnnnnnnnnnnnnnnnnnnnnnnnnnnnnnnnnnnnnnnnnnnnnnnnnnnnnnnnnnnnnnnnnnnnnnnnnnnnnnnnnnnnnnnnnnnnnnnnnnnnnnnnnnnnnnnnnnnnnnnnnnnnnnnnnnnnnnnnnnnnnnnnnnnnnnnnnnnnnnnnnnnnnnnnnnnnnnnnnnnnnnnnnnnnnnnnnnnnnnnnnnnnnnnnnnnnnnnnnnnnnnnnnnnnnnnnnnnnnnnnnnnnnnnnnnnnnnnnnnnnnnnnnnnnnnnnnnnnnnnnnnnnnnnnnnnnnnnnnnnnnnnnnnnnnnnnnnnnnnnnnnnnnnnnnnnnnnnnnnnnnnnnnnnnnnnnnnnnnnnnnnnnnnnnnnnnnnnnnnnnnnnnnnnnnnnnnnnnnnnnnnnnnnnnnnnnnnnnnnnnnnnnnnnnnnnnnnnnnnnnnnnnnnnnnnnnnnnnnnnnnnnnnnnnnnnnnnnnnnnnnnnnnnnnnnnnnnnnnnnnnnnnnnnnnnnnnnnnnnnnnnnnnnnnnnnnnnnnnnnnnnnnnnnnnnnnnnnnnnnnnnnnnnnnnnnnnnnnnnnnnnnnnnnnnnnnnnnnnnnnnnnnnnnnnnnnnnnnnnnnnnnnnnnnnnnnnnnnnnnnnnnnnnnnnnnnnnnnnnnnnnnnnnnnnnnnnnnnnnnnnnnnnnnnnnnnnnnnnnnnnnnnnnnnnnnnnnnnnnnnnnnnnnnnnnnnnnnnnnnnnnnnnnnnnnnnnnnnnnnnnnnnnnnnnnnnnnnnnnnnnnnnnnnnnnnnnnnnnnnnnnnnnnnnnnnnnnnnnnnnnnnnnnnnnnnnnnnnnnnnnnnnnnnnnnnnnnnnnnnnnnnnnnnnnnnnnnnnnnnnnnnnnnnnnnnnnnnnnnnnnnnnnnnnnnnnnnnnnnnnnnnnnnnnnnnnnnnnnnnnnnnnnnnnnnnnnnnnnnnnnnnnnnnnnnnnnnnnnnnnnnnnnnnnnnnnnnnnnnnnnnnnnnnnnnnnnnnnnnnnnnnnnnnnnnnnnnnnnnnnnnnnnnnnnnnnnnnnnnnnnnnnnnnnnnnnnnnnnnnnnnnnnnnnnnnnnnnnnnnnnnnnnnnnnnnnnnnnnnnnnnnnnnnnnnnnnnnnnnnnnnnnnnnnnnnnnnnnnnnnnnnnnnnnnnnnnnnnnnnnnnnnnnnnnnnnnnnnnnnnnnnnnnnnnnnnnnnnnnnnnnnnnnnnnnnnnnnnnnnnnnnnnnnnnnnnnnnnnnnnnnnnnnnnnnnnnnnnnnnnnnnnnnnnnnnnnnnnnnnnnnnnnnnnnnnnnnnnnnnnnnnnnnnnnnnnnnnnnnnnnnnnnnnnnnnnnnnnnnnnnnnnnnnnnnnnnnnnnnnnnnnnnnnnnnnnnnnnnnnnnnnnnnnnnnnnnnnnnnnnnnnnnnnnnnnnnnnnnnnnnnnnnnnnnnnnnnnnnnnnnnnnnnnnnnnnnnnnnnnnnnnnnnnnnnnnnnnnnnnnnnnnnnnnnnnnnnnnnnnnnnnnnnnnnnnnnnnnnnnnnnnnnnnnnnnnnnnnnnnnnnnnnnnnnnnnnnnnnnnnnnnnnnnnnnnnnnnnnnnnnnnnnnnnnnnnnnnnnnnnnnnnnnnnnnnnnnnnnnnnnnnnnnnnnnnnnnnnnnnnnnnnnnnnnnnnnnnnnnnnnnnnnnnnnnnnnnnnnnnnnnnnnnnnnnnnnnnnnnnnnnnnnnnnnnnnnnnnnnnnnnnnnnnnnnnnnnnnnnnnnnnnnnnnnnnnnnnnnnnnnnnnnnnnnnnnnnnnnnnnnnnnnnnnnnnnnnnnnnnnnnnnnnnnnnnnnnnnnnnnnnnnnnnnnnnnnnnnnnnnnnnnnnnnnnnnnnnnnnnnnnnnnnnnnnnnnnnnnnnnnnnnnnnnnnnnnnnnnnnnnnnnnnnnnnnnnnnnnnnnnnnnnnnnnnnnnnnnnnnnnnnnnnnnnnnnnnnnnnnnnnnnnnnnnnnnnnnnnnnnnnnnnnnnnnnnnnnnnnnnnnnnnnnnnnnnnnnnnnnnnnnnnnnnnnnnnnnnnnnnnnnnnnnnnnnnnnnnnnnnnnnnnnnnnnnnnnnnnnnnnnnnnnnnnnnnnnnnnnnnnnnnnnnnnnnnnnnnnnnnnnnnnnnnnnnnnnnnnnnnnnnnnnnnnnnnnnnnnnnnnnnnnnnnnnnnnnnnnnnnnnnnnnnnnnnnnnnnnnnnnnnnnnnnnnnnnnnnnnnnnnnnnnnnnnnnnnnnnnnnnnnnnnnnnnnnnnnnnnnnnnnnnnnnnnnnnnnnnnnnnnnnnnnnnnnnnnnnnnnnnnnnnnnnnnnnnnnnnnnnnnnnnnnnnnnnnnnnnnnnnnnnnnnnnnnnnnnnnnnnnnnnnnnnnnnnnnnnnnnnnnnnnnnnnnnnnnnnnnnnnnnnnnnnnnnnnnnnnnnnnnnnnnnnnnnnnnnnnnnnnnnnnnnnnnnnnnnnnnnnnnnnnnnnnnnnnnnnnnnnnnnnnnnnnnnnnnnnnnnnnnnnnnnnnnnnnnnnnnnnnnnnnnnnnnnnnnnnnnnnnnnnnnnnnnnnnnnnnnnnnnnnnnnnnnnnnnnnnnnnnnnnnnnnnnnnnnnnnnnnnnnnnnnnnnnnnnnnnnnnnnnnnnnnnnnnnnnnnnnnnnnnnnnnnnnnnnnnnnnnnnnnnnnnnnnnnnnnnnnnnnnnnnnnnnnnnnnnnnnnnnnnnnnnnnnnnnnnnnnnnnnnnnnnnnnnnnnnnnnnnnnnnnnnnnnnnnnnnnnnnnnnnnnnnnnnnnnnnnnnnnnnnnnnnnnnnnnnnnnnnnnnnnnnnnnnnnnnnnnnnnnnnnnnnnnnnnnnnnnnnnnnnnnnnnnnnnnnnnnnnnnnnnnnnnnnnnnnnnnnnnnnnnnnnnnnnnnnnnnnnnnnnnnnnnnnnnnnnnnnnnnnnnnnnnnnnnnnnnnnnnnnnnnnnnnnnnnnnnnnnnnnnnnnnnnnnnnnnnnnnnnnnnnnnnnnnnnnnnnnnnnnnnnnnnnnnnnnnnnnnnnnnnnnnnnnnnnnnnnnnnnnnnnnnnnnnnnnnnnnnnnnnnnnnnnnnnnnnnnnnnnnnnnnnnnnnnnnnnnnnnnnnnnnnnnnnnnnnnnnnnnnnnnnnnnnnnnnnnnnnnnnnnnnnnnnnnnnnnnnnnnnnnnnnnnnnnnnnnnnnnnnnnnnnnnnnnnnnnnnnnnnnnnnnnnnnnnnnnnnnnnnnnnnnnnnnnnnnnnnnnnnnnnnnnnnnnnnnnnnnnnnnnnnnnnnnnnnnnnnnnnnnnnnnnnnnnnnnnnnnnnnnnnnnnnnnnnnnnnnnnnnnnnnnnnnnnnnnnnnnnnnnnnnnnnnnnnnnnnnnnnnnnnnnnnnnnnnnnnnnnnnnnnnnnnnnnnnnnnnnnnnnnnnnnnnnnnnnnnnnnnnnnnnnnnnnnnnnnnnnnnnnnnnnnnnnnnnnnnnnnnnnnnnnnnnnnnnnnnnnnnnnnnnnnnnnnnnnnnnnnnnnnnnnnnnnnnnnnnnnnnnnnnnnnnnnnnnnnnnnnnnnnnnnnnnnnnnnnnnnnnnnnnnnnnnnnnnnnnnnnnnnnnnnnnnnnnnnnnnnnnnnnnnnnnnnnnnnnnnnnnnnnnnnnnnnnnnnnnnnnnnnnnnnnnnnnnnnnnnnnnnnnnnnnnnnnnnnnnnnnnnnnnnnnnnnnnnnnnnnnnnnnnnnnnnnnnnnnnnnnnnnnnnnnnnnnnnnnnnnnnnnnnnnnnnnnnnnnnnnnnnnnnnnnnnnnnnnnnnnnnnnnnnnnnnnnnnnnnnnnnnnnnnnnnnnnnnnnnnnnnnnnnnnnnnnnnnnnnnnnnnnnnnnnnnnnnnnnnnnnnnnnnnnnnnnnnnnnnnnnnnnnnnnnnnnnnnnnnnnnnnnnnnnnnnnnnnnnnnnnnnnnnnnnnnnnnnnnnnnnnnnnnnnnnnnnnnnnnnnnnnnnnnnnnnnnnnnnnnnnnnnnnnnnnnnnnnnnnnnnnnnnnnnnnnnnnnnnnnnnnnnnnnnnnnnnnnnnnnnnnnnnnnnnnnnnnnnnnnnnnnnnnnnnnnnnnnnnnnnnnnnnnnnnnnnnnnnnnnnnnnnnnnnnnnnnnnnnnnnnnnnnnnnnnnnnnnnnnnnnnnnnnnnnnnnnnnnnnnnnnnnnnnnnnnnnnnnnnnnnnnnnnnnnnnnnnnnnnnnnnnnnnnnnnnnnnnnnnnnnnnnnnnnnnnnnnnnnnnnnnnnnnnnnnnnnnnnnnnnnnnnnnnnnnnnnnnnnnnnnnnnnnnnnnnnnnnnnnnnnnnnnnnnnnnnnnnnnnnnnnnnnnnnnnnnnnnnnnnnnnnnnnnnnnnnnnnnnnnnnnnnnnnnnnnnnnnnnnnnnnnnnnnnnnnnnnnnnnnnnnnnnnnnnnnnnnnnnnnnnnnnnnnnnnnnnnnnnnnnnnnnnnnnnnnnnnnnnnnnnnnnnnnnnnnnnnnnnnnnnnnnnnnnnnnnnnnnnnnnnnnnnnnnnnnnnnnnnnnnnnnnnnnnnnnnnnnnnnnnnnnnnnnnnnnnnnnnnnnnnnnnnnnnnnnnnnnnnnnnnnnnnnnnnnnnnnnnnnnnnnnnnnnnnnnnnnnnnnnnnnnnnnnnnnnnnnnnnnnnnnnnnnnnnnnnnnnnnnnnnnnnnnnnnnnnnnnnnnnnnnnnnnnnnnnnnnnnnnnnnnnnnnnnnnnnnnnnnnnnnnnnnnnnnnnnnnnnnnnnnnnnnnnnnnnnnnnnnnnnnnnnnnnnnnnnnnnnnnnnnnnnnnnnnnnnnnnnnnnnnnnnnnnnnnnnnnnnnnnnnnnnnnnnnnnnnnnnnnnnnnnnnnnnnnnnnnnnnnnnnnnnnnnnnnnnnnnnnnnnnnnnnnnnnnnnnnnnnnnnnnnnnnnnnnnnnnnnnnnnnnnnnnnnnnnnnnnnnnnnnnnnnnnnnnnnnnnnnnnnnnnnnnnnnnnnnnnnnnnnnnnnnnnnnnnnnnnnnnnnnnnnnnnnnnnnnnnnnnnnnnnnnnnnnnnnnnnnnnnnnnnnnnnnnnnnnnnnnnnnnnnnnnnnnnnnnnnnnnnnnnnnnnnnnnnnnnnnnnnnnnnnnnnnnnnnnnnnnnnnnnnnnnnnnnnnnnnnnnnnnnnnnnnnnnnnnnnnnnnnnnnnnnnnnnnnnnnnnnnnnnnnnnnnnnnnnnnnnnnnnnnnnnnnnnnnnnnnnnnnnnnnnnnnnnnnnnnnnnnnnnnnnnnnnnnnnnnnnnnnnnnnnnnnnnnnnnnnnnnnnnnnnnnnnnnnnnnnnnnnnnnnnnnnnnnnnnnnnnnnnnnnnnnnnnnnnnnnnnnnnnnnnnnnnnnnnnnnnnnnnnnnnnnnnnnnnnnnnnnnnnnnnnnnnnnnnnnnnnnnnnnnnnnnnnnnnnnnnnnnnnnnnnnnnnnnnnnnnnnnnnnnnnnnnnnnnnnnnnnnnnnnnnnnnnnnnnnnnnnnnnnnnnnnnnnnnnnnnnnnnnnnnnnnnnnnnnnnnnnnnnnnnnnnnnnnnnnnnnnnnnnnnnnnnnnnnnnnnnnnnnnnnnnnnnnnnnnnnnnnnnnnnnnnnnnnnnnnnnnnnnnnnnnnnnnnnnnnnnnnnnnnnnnnnnnnnnnnnnnnnnnnnnnnnnnnnnnnnnnnnnnnnnnnnnnnnnnnnnnnnnnnnnnnnnnnnnnnnnnnnnnnnnnnnnnnnnnnnnnnnnnnnnnnnnnnnnnnnnnnnnnnnnnnnnnnnnnnnnnnnnnnnnnnnnnnnnnnnnnnnnnnnnnnnnnnnnnnnnnnnnnnnnnnnnnnnnnnnnnnnnnnnnnnnnnnnnnnnnnnnnnnnnnnnnnnnnnnnnnnnnnnnnnnnnnnnnnnnnnnnnnnnnnnnnnnnnnnnnnnnnnnnnnnnnnnnnnnnnnnnnnnnnnnnnnnnnnnnnnnnnnnnnnnnnnnnnnnnnnnnnnnnnnnnnnnnnnnnnnnnnnnnnnnnnnnnnnnnnnnnnnnnnnnnnnnnnnnnnnnnnnnnnnnnnnnnnnnnnnnnnnnnnnnnnnnnnnnnnnnnnnnnnnnnnnnnnnnnnnnnnnnnnnnnnnnnnnnnnnnnnnnnnnnnnnnnnnnnnnnnnnnnnnnnnnnnnnnnnnnnnnnnnnnnnnnnnnnnnnnnnnnnnnnnnnnnnnnnnnnnnnnnnnnnnnnnnnnnnnnnnnnnnnnnnnnnnnnnnnnnnnnnnnnnnnnnnnnnnnnnnnnnnnnnnnnnnnnnnnnnnnnnnnnnnnnnnnnnnnnnnnnnnnnnnnnnnnnnnnnnnnnnnnnnnnnnnnnnnnnnnnnnnnnnnnnnnnnnnnnnnnnnnnnnnnnnnnnnnnnnnnnnnnnnnnnnnnnnnnnnnnnnnnnnnnnnnnnnnnnnnnnnnnnnnnnnnnnnnnnnnnnnnnnnnnnnnnnnnnnnnnnnnnnnnnnnnnnnnnnnnnnnnnnnnnnnnnnnnnnnnnnnnnnnnnnnnnnnnnnnnnnnnnnnnnnnnnnnnnnnnnnnnnnnnnnnnnnnnnnnnnnnnnnnnnnnnnnnnnnnnnnnnnnnnnnnnnnnnnnnnnnnnnnnnnnnnnnnnnnnnnnnnnnnnnnnnnnnnnnnnnnnnnnnnnnnnnnnnnnnnnnnnnnnnnnnnnnnnnnnnnnnnnnnnnnnnnnnnnnnnnnnnnnnnnnnnnnnnnnnnnnnnnnnnnnnnnnnnnnnnnnnnnnnnnnnnnnnnnnnnnnnnnnnnnnnnnnnnnnnnnnnnnnnnnnnnnnnnnnnnnnnnnnnnnnnnnnnnnnnnnnnnnnnnnnnnnnnnnnnnnnnnnnnnnnnnnnnnnnnnnnnnnnnnnnnnnnnnnnnnnnnnnnnnnnnnnnnnnnnnnnnnnnnnnnnnnnnnnnnnnnnnnnnnnnnnnnnnnnnnnnnnnnnnnnnnnnnnnnnnnnnnnnnnnnnnnnnnnnnnnnnnnnnnnnnnnnnnnnnnnnnnnnnnnnnnnnnnnnnnnnnnnnnnnnnnnnnnnnnnnnnnnnnnnnnnnnnnnnnnnnnnnnnnnnnnnnnnnnnnnnnnnnnnnnnnnnnnnnnnnnnnnnnnnnnnnnnnnnnnnnnnnnnnnnnnnnnnnnnnnnnnnnnnnnnnnnnnnnnnnnnnnnnnnnnnnnnnnnnnnnnnnnnnnnnnnnnnnnnnnnnnnnnnnnnnnnnnnnnnnnnnnnnnnnnnnnnnnnnnnnnnnnnnnnnnnnnnnnnnnnnnnnnnnnnnnnnnnnnnnnnnnnnnnnnnnnnnnnnnnnnnnnnnnnnnnnnnnnnnnnnnnnnnnnnnnnnnnnnnnnnnnnnnnnnnnnnnnnnnnnnnnnnnnnnnnnnnnnnnnnnnnnnnnnnnnnnnnnnnnnnnnnnnnnnnnnnnnnnnnnnnnnnnnnnnnnnnnnnnnnnnnnnnnnnnnnnnnnnnnnnnnnnnnnnnnnnnnnnnnnnnnnnnnnnnnnnnnnnnnnnnnnnnnnnnnnnnnnnnnnnnnnnnnnnnnnnnnnnnnnnnnnnnnnnnnnnnnnnnnnnnnnnnnnnnnnnnnnnnnnnnnnnnnnnnnnnnnnnnnnnnnnnnnnnnnnnnnnnnnnnnnnnnnnnnnnnnnnnnnnnnnnnnnnnnnnnnnnnnnnnnnnnnnnnnnnnnnnnnnnnnnnnnnnnnnnnnnnnnnnnnnnnnnnnnnnnnnnnnnnnnnnnnnnnnnnnnnnnnnnnnnnnnnnnnnnnnnnnnnnnnnnnnnnnnnnnnnnnnnnnnnnnnnnnnnnnnnnnnnnnnnnnnnnnnnnnnnnnnnnnnnnnnnnnnnnnnnnnnnnnnnnnnnnnnnnnnnnnnnnnnnnnnnnnnnnnnnnnnnnnnnnnnnnnnnnnnnnnnnnnnnnnnnnnnnnnnnnnnnnnnnnnnnnnnnnnnnnnnnnnnnnnnnnnnnnnnnnnnnnnnnnnnnnnnnnnnnnnnnnnnnnnnnnnnnnnnnnnnnnnnnnnnnnnnnnnnnnnnnnnnnnnnnnnnnnnnnnnnnnnnnnnnnnnnnnnnnnnnnnnnnnnnnnnnnnnnnnnnnnnnnnnnnnnnnnnnnnnnnnnnnnnnnnnnnnnnnnnnnnnnnnnnnnnnnnnnnnnnnnnnnnnnnnnnnnnnnnnnnnnnnnnnnnnnnnnnnnnnnnnnnnnnnnnnnnnnnnnnnnnnnnnnnnnnnnnnnnnnnnnnnnnnnnnnnnnnnnnnnnnnnnnnnnnnnnnnnnnnnnnnnnnnnnnnnnnnnnnnnnnnnnnnnnnnnnnnnnnnnnnnnnnnnnnnnnnnnnnnnnnnnnnnnnnnnnnnnnnnnnnnnnnnnnnnnnnnnnnnnnnnnnnnnnnnnnnnnnnnnnnnnnnnnnnnnnnnnnnnnnnnnnnnnnnnnnnnnnnnnnnnnnnnnnnnnnnnnnnnnnnnnnnnnnnnnnnnnnnnnnnnnnnnnnnnnnnnnnnnnnnnnnnnnnnnnnnnnnnnnnnnnnnnnnnnnnnnnnnnnnnnnnnnnnnnnnnnnnnnnnnnnnnnnnnnnnnnnnnnnnnnnnnnnnnnnnnnnnnnnnnnnnnnnnnnnnnnnnnnnnnnnnnnnnnnnnnnnnnnnnnnnnnnnnnnnnnnnnnnnnnnnnnnnnnnnnnnnnnnnnnnnnnnnnnnnnnnnnnnnnnnnnnnnnnnnnnnnnnnnnnnnnnnnnnnnnnnnnnnnnnnnnnnnnnnnnnnnnnnnnnnnnnnnnnnnnnnnnnnnnnnnnnnnnnnnnnnnnnnnnnnnnnnnnnnnnnnnnnnnnnnnnnnnnnnnnnnnnnnnnnnnnnnnnnnnnnnnnnnnnnnnnnnnnnnnnnnnnnnnnnnnnnnnnnnnnnnnnnnnnnnnnnnnnnnnnnnnnnnnnnnnnnnnnnnnnnnnnnnnnnnnnnnnnnnnnnnnnnnnnnnnnnnnnnnnnnnnnnnnnnnnnnnnnnnnnnnnnnnnnnnnnnnnnnnnnnnnnnnnnnnnnnnnnnnnnnnnnnnnnnnnnnnnnnnnnnnnnnnnnnnnnnnnnnnnnnnnnnnnnnnnnnnnnnnnnnnnnnnnnnnnnnnnnnnnnnnnnnnnnnnnnnnnnnnnnnnnnnnnnnnnnnnnnnnnnnnnnnnnnnnnnnnnnnnnnnnnnnnnnnnnnnnnnnnnnnnnnnnnnnnnnnnnnnnnnnnnnnnnnnnnnnnnnnnnnnnnnnnnnnnnnnnnnnnnnnnnnnnnnnnnnnnnnnnnnnnnnnnnnnnnnnnnnnnnnnnnnnnnnnnnnnnnnnnnnnnnnnnnnnnnnnnnnnnnnnnnnnnnnnnnnnnnnnnnnnnnnnnnnnnnnnnnnnnnnnnnnnnnnnnnnnnnnnnnnnnnnnnnnnnnnnnnnnnnnnnnnnnnnnnnnnnnnnnnnnnnnnnnnnnnnnnnnnnnnnnnnnnnnnnnnnnnnnnnnnnnnnnnnnnnnnnnnnnnnnnnnnnnnnnnnnnnnnnnnnnnnnnnnnnnnnnnnnnnnnnnnnnnnnnnnnnnnnnnnnnnnnnnnnnnnnnnnnnnnnnnnnnnnnnnnnnnnnnnnnnnnnnnnnnnnnnnnnnnnnnnnnnnnnnnnnnnnnnnnnnnnnnnnnnnnnnnnnnnnnnnnnnnnnnnnnnnnnnnnnnnnnnnnnnnnnnnnnnnnnnnnnnnnnnnnnnnnnnnnnnnnnnnnnnnnnnnnnnnnnnnnnnnnnnnnnnnnnnnnnnnnnnnnnnnnnnnnnnnnnnnnnnnnnnnnnnnnnnnnnnnnnnnnnnnnnnnnnnnnnnnnnnnnnnnnnnnnnnnnnnnnnnnnnnnnnnnnnnnnnnnnnnnnnnnnnnnnnnnnnnnnnnnnnnnnnnnnnnnnnnnnnnnnnnnnnnnnnnnnnnnnnnnnnnnnnnnnnnnnnnnnnnnnnnnnnnnnnnnnnnnnnnnnnnnnnnnnnnnnnnnnnnnnnnnnnnnnnnnnnnnnnnnnnnnnnnnnnnnnnnnnnnnnnnnnnnnnnnnnnnnnnnnnnnnnnnnnnnnnnnnnnnnnnnnnnnnnnnnnnnnnnnnnnnnnnnnnnnnnnnnnnnnnnnnnnnnnnnnnnnnnnnnnnnnnnnnnnnnnnnnnnnnnnnnnnnnnnnnnnnnnnnnnnnnnnnnnnnnnnnnnnnnnnnnnnnnnnnnnnnnnnnnnnnnnnnnnnnnnnnnnnnnnnnnnnnnnnnnnnnnnnnnnnnnnnnnnnnnnnnnnnnnnnnnnnnnnnnnnnnnnnnnnnnnnnnnnnnnnnnnnnnnnnnnnnnnnnnnnnnnnnnnnnnnnnnnnnnnnnnnnnnnnnnnnnnnnnnnnnnnnnnnnnnnnnnnnnnnnnnnnnnnnnnnnnnnnnnnnnnnnnnnnnnnnnnnnnnnnnnnnnnnnnnnnnnnnnnnnnnnnnnnnnnnnnnnnnnnnnnnnnnnnnnnnnnnnnnnnnnnnnnnnnnnnnnnnnnnnnnnnnnnnnnnnnnnnnnnnnnnnnnnnnnnnnnnnnnnnnnnnnnnnnnnnnnnnnnnnnnnnnnnnnnnnnnnnnnnnnnnnnnnnnnnnnnnnnnnnnnnnnnnnnnnnnnnnnnnnnnnnnnnnnnnnnnnnnnnnnnnnnnnnnnnnnnnnnnnnnnnnnnnnnnnnnnnnnnnnnnnnnnnnnnnnnnnnnnnnnnnnnnnnnnnnnnnnnnnnnnnnnnnnnnnnnnnnnnnnnnnnnnnnnnnnnnnnnnnnnnnnnnnnnnnnnnnnnnnnnnnnnnnnnnnnnnnnnnnnnnnnnnnnnnnnnnnnnnnnnnnnnnnnnnnnnnnnnnnnnnnnnnnnnnnnnnnnnnnnnnnnnnnnnnnnnnnnnnnnnnnnnnnnnnnnnnnnnnnnnnnnnnnnnnnnnnnnnnnnnnnnnnnnnnnnnnnnnnnnnnnnnnnnnnnnnnnnnnnnnnnnnnnnnnnnnnnnnnnnnnnnnnnnnnnnnnnnnnnnnnnnnnnnnnnnnnnnnnnnnnnnnnnnnnnnnnnnnnnnnnnnnnnnnnnnnnnnnnnnnnnnnnnnnnnnnnnnnnnnnnnnnnnnnnnnnnnnnnnnnnnnnnnnnnnnnnnnnnnnnnnnnnnnnnnnnnnnnnnnnnnnnnnnnnnnnnnnnnnnnnnnnnnnnnnnnnnnnnnnnnnnnnnnnnnnnnnnnnnnnnnnnnnnnnnnnnnnnnnnnnnnnnnnnnnnnnnnnnnnnnnnnnnnnnnnnnnnnnnnnnnnnnnnnnnnnnnnnnnnnnnnnnnnnnnnnnnnnnnnnnnnnnnnnnnnnnnnnnnnnnnnnnnnnnnnnnnnnnnnnnnnnnnnnnnnnnnnnnnnnnnnnnnnnnnnnnnnnnnnnnnnnnnnnnnnnnnnnnnnnnnnnnnnnnnnnnnnnnnnnnnnnnnnnnnnnnnnnnnnnnnnnnnnnnnnnnnnnnnnnnnnnnnnnnnnnnnnnnnnnnnnnnnnnnnnnnnnnnnnnnnnnnnnnnnnnnnnnnnnnnnnnnnnnnnnnnnnnnnnnnnnnnnnnnnnnnnnnnnnnnnnnnnnnnnnnnnnnnnnnnnnnnnnnnnnnnnnnnnnnnnnnnnnnnnnnnnnnnnnnnnnnnnnnnnnnnnnnnnnnnnnnnnnnnnnnnnnnnnnnnnnnnnnnnnnnnnnnnnnnnnnnnnnnnnnnnnnnnnnnnnnnnnnnnnnnnnnnnnnnnnnnnnnnnnnnnnnnnnnnnnnnnnnnnnnnnnnnnnnnnnnnnnnnnnnnnnnnnnnnnnnnnnnnnnnnnnnnnnnnnnnnnnnnnnnnnnnnnnnnnnnnnnnnnnnnnnnnnnnnnnnnnnnnnnnnnnnnnnnnnnnnnnnnnnnnnnnnnnnnnnnnnnnnnnnnnnnnnnnnnnnnnnnnnnnnnnnnnnnnnnnnnnnnnnnnnnnnnnnnnnnnnnnnnnnnnnnnnnnnnnnnnnnnnnnnnnnnnnnnnnnnnnnnnnnnnnnnnnnnnnnnnnnnnnnnnnnnnnnnnnnnnnnnnnnnnnnnnnnnnnnnnnnnnnnnnnnnnnnnnnnnnnnnnnnnnnnnnnnnnnnnnnnnnnnnnnnnnnnnnnnnnnnnnnnnnnnnnnnnnnnnnnnnnnnnnnnnnnnnnnnnnnnnnnnnnnnnnnnnnnnnnnnnnnnnnnnnnnnnnnnnnnnnnnnnnnnnnnnnnnnnnnnnnnnnnnnnnnnnnnnnnnnnnnnnnnnnnnnnnnnnnnnnnnnnnnnnnnnnnnnnnnnnnnnnnnnnnnnnnnnnnnnnnnnnnnnnnnnnnnnnnnnnnnnnnnnnnnnnnnnnnnnnnnnnnnnnnnnnnnnnnnnnnnnnnnnnnnnnnnnnnnnnnnnnnnnnnnnnnnnnnnnnnnnnnnnnnnnnnnnnnnnnnnnnnnnnnnnnnnnnnnnnnnnnnnnnnnnnnnnnnnnnnnnnnnnnnnnnnnnnnnnnnnnnnnnnnnnnnnnnnnnnnnnnnnnnnnnnnnnnnnnnnnnnnnnnnnnnnnnnnnnnnnnnnnnnnnnnnnnnnnnnnnnnnnnnnnnnnnnnnnnnnnnnnnnnnnnnnnnnnnnnnnnnnnnnnnnnnnnnnnnnnnnnnnnnnnnnnnnnnnnnnnnnnnnnnnnnnnnnnnnnnnnnnnnnnnnnnnnnnnnnnnnnnnnnnnnnnnnnnnnnnnnnnnnnnnnnnnnnnnnnnnnnnnnnnnnnnnnnnnnnnnnnnnnnnnnnnnnnnnnnnnnnnnnnnnnnnnnnnnnnnnnnnnnnnnnnnnnnnnnnnnnnnnnnnnnnnnnnnnnnnnnnnnnnnnnnnnnnnnnnnnnnnnnnnnnnnnnnnnnnnnnnnnnnnnnnnnnnnnnnnnnnnnnnnnnnnnnnnnnnnnnnnnnnnnnnnnnnnnnnnnnnnnnnnnnnnnnnnnnnnnnnnnnnnnnnnnnnnnnnnnnnnnnnnnnnnnnnnnnnnnnnnnnnnnnnnnnnnnnnnnnnnnnnnnnnnnnnnnnnnnnnnnnnnnnnnnnnnnnnnnnnnnnnnnnnnnnnnnnnnnnnnnnnnnnnnnnnnnnnnnnnnnnnnnnnnnnnnnnnnnnnnnnnnnnnnnnnnnnnnnnnnnnnnnnnnnnnnnnnnnnnnnnnnnnnnnnnnnnnnnnnnnnnnnnnnnnnnnnnnnnnnnnnnnnnnnnnnnnnnnnnnnnnnnnnnnnnnnnnnnnnnnnnnnnnnnnnnnnnnnnnnnnnnnnnnnnnnnnnnnnnnnnnnnnnnnnnnnnnnnnnnnnnnnnnnnnnnnnnnnnnnnnnnnnnnnnnnnnnnnnnnnnnnnnnnnnnnnnnnnnnnnnnnnnnnnnnnnnnnnnnnnnnnnnnnnnnnnnnnnnnnnnnnnnnnnnnnnnnnnnnnnnnnnnnnnnnnnnnnnnnnnnnnnnnnnnnnnnnnnnnnnnnnnnnnnnnnnnnnnnnnnnnnnnnnnnnnnnnnnnnnnnnnnnnnnnnnnnnnnnnnnnnnnnnnnnnnnnnnnnnnnnnnnnnnnnnnnnnnnnnnnnnnnnnnnnnnnnnnnnnnnnnnnnnnnnnnnnnnnnnnnnnnnnnnnnnnnnnnnnnnnnnnnnnnnnnnnnnnnnnnnnnnnnnnnnnnnnnnnnnnnnnnnnnnnnnnnnnnnnnnnnnnnnnnnnnnnnnnnnnnnnnnnnnnnnnnnnnnnnnnnnnnnnnnnnnnnnnnnnnnnnnnnnnnnnnnnnnnnnnnnnnnnnnnnnnnnnnnnnnnnnnnnnnnnnnnnnnnnnnnnnnnnnnnnnnnnnnnnnnnnnnnnnnnnnnnnnnnnnnnnnnnnnnnnnnnnnnnnnnnnnnnnnnnnnnnnnnnnnnnnnnnnnnnnnnnnnnnnnnnnnnnnnnnnnnnnnnnnnnnnnnnnnnnnnnnnnnnnnnnnnnnnnnnnnnnnnnnnnnnnnnnnnnnnnnnnnnnnnnnnnnnnnnnnnnnnnnnnnnnnnnnnnnnnnnnnnnnnnnnnnnnnnnnnnnnnnnnnnnnnnnnnnnnnnnnnnnnnnnnnnnnnnnnnnnnnnnnnnnnnnnnnnnnnnnnnnnnnnnnnnnnnnnnnnnnnnnnnnnnnnnnnnnnnnnnnnnnnnnnnnnnnnnnnnnnnnnnnnnnnnnnnnnnnnnnnnnnnnnnnnnnnnnnnnnnnnnnnnnnnnnnnnnnnnnnnnnnnnnnnnnnnnnnnnnnnnnnnnnnnnnnnnnnnnnnnnnnnnnnnnnnnnnnnnnnnnnnnnnnnnnnnnnnnnnnnnnnnnnnnnnnnnnnnnnnnnnnnnnnnnnnnnnnnnnnnnnnnnnnnnnnnnnnnnnnnnnnnnnnnnnnnnnnnnnnnnnnnnnnnnnnnnnnnnnnnnnnnnnnnnnnnnnnnnnnnnnnnnnnnnnnnnnnnnnnnnnnnnnnnnnnnnnnnnnnnnnnnnnnnnnnnnnnnnnnnnnnnnnnnnnnnnnnnnnnnnnnnnnnnnnnnnnnnnnnnnnnnnnnnnnnnnnnnnnnnnnnnnnnnnnnnnnnnnnnnnnnnnnnnnnnnnnnnnnnnnnnnnnnnnnnnnnnnnnnnnnnnnnnnnnnnnnnnnnnnnnnnnnnnnnnnnnnnnnnnnnnnnnnnnnnnnnnnnnnnnnnnnnnnnnnnnnnnnnnnnnnnnnnnnnnnnnnnnnnnnnnnnnnnnnnnnnnnnnnnnnnnnnnnnnnnnnnnnnnnnnnnnnnnnnnnnnnnnnnnnnnnnnnnnnnnnnnnnnnnnnnnnnnnnnnnnnnnnnnnnnnnnnnnnnnnnnnnnnnnnnnnnnnnnnnnnnnnnnnnnnnnnnnnnnnnnnnnnnnnnnnnnnnnnnnnnnnnnnnnnnnnnnnnnnnnnnnnnnnnnnnnnnnnnnnnnnnnnnnnnnnnnnnnnnnnnnnnnnnnnnnnnnnnnnnnnnnnnnnnnnnnnnnnnnnnnnnnnnnnnnnnnnnnnnnnnnnnnnnnnnnnnnnnnnnnnnnnnnnnnnnnnnnnnnnnnnnnnnnnnnnnnnnnnnnnnnnnnnnnnnnnnnnnnnnnnnnnnnnnnnnnnnnnnnnnnnnnnnnnnnnnnnnnnnnnnnnnnnnnnnnnnnnnnnnnnnnnnnnnnnnnnnnnnnnnnnnnnnnnnnnnnnnnnnnnnnnnnnnnnnnnnnnnnnnnnnnnnnnnnnnnnnnnnnnnnnnnnnnnnnnnnnnnnnnnnnnnnnnnnnnnnnnnnnnnnnnnnnnnnnnnnnnnnnnnnnnnnnnnnnnnnnnnnnnnnnnnnnnnnnnnnnnnnnnnnnnnnnnnnnnnnnnnnnnnnnnnnnnnnnnnnnnnnnnnnnnnnnnnnnnnnnnnnnnnnnnnnnnnnnnnnnnnnnnnnnnnnnnnnnnnnnnnnnnnnnnnnnnnnnnnnnnnnnnnnnnnnnnnnnnnnnnnnnnnnnnnnnnnnnnnnnnnnnnnnnnnnnnnnnnnnnnnnnnnnnnnnnnnnnnnnnnnnnnnnnnnnnnnnnnnnnnnnnnnnnnnnnnnnnnnnnnnnnnnnnnnnnnnnnnnnnnnnnnnnnnnnnnnnnnnnnnnnnnnnnnnnnnnnnnnnnnnnnnnnnnnnnnnnnnnnnnnnnnnnnnnnnnnnnnnnnnnnnnnnnnnnnnnnnnnnnnnnnnnnnnnnnnnnnnnnnnnnnnnnnnnnnnnnnnnnnnnnnnnnnnnnnnnnnnnnnnnnnnnnnnnnnnnnnnnnnnnnnnnnnnnnnnnnnnnnnnnnnnnnnnnnnnnnnnnnnnnnnnnnnnnnnnnnnnnnnnnnnnnnnnnnnnnnnnnnnnnnnnnnnnnnnnnnnnnnnnnnnnnnnnnnnnnnnnnnnnnnnnnnnnnnnnnnnnnnnnnnnnnnnnnnnnnnnnnnnnnnnnnnnnnnnnnnnnnnnnnnnnnnnnnnnnnnnnnnnnnnnnnnnnnnnnnnnnnnnnnnnnnnnnnnnnnnnnnnnnnnnnnnnnnnnnnnnnnnnnnnnnnnnnnnnnnnnnnnnnnnnnnnnnnnnnnnnnnnnnnnnnnnnnnnnnnnnnnnnnnnnnnnnnnnnnnnnnnnnnnnnnnnnnnnnnnnnnnnnnnnnnnnnnnnnnnnnnnnnnnnnnnnnnnnnnnnnnnnnnnnnnnnnnnnnnnnnnnnnnnnnnnnnnnnnnnnnnnnnnnnnnnnnnnnnnnnnnnnnnnnnnnnnnnnnnnnnnnnnnnnnnnnnnnnnnnnnnnnnnnnnnnnnnnnnnnnnnnnnnnnnnnnnnnnnnnnnnnnnnnnnnnnnnnnnnnnnnnnnnnnnnnnnnnnnnnnnnnnnnnnnnnnnnnnnnnnnnnnnnnnnnnnnnnnnnnnnnnnnnnnnnnnnnnnnnnnnnnnnnnnnnnnnnnnnnnnnnnnnnnnnnnnnnnnnnnnnnnnnnnnnnnnnnnnnnnnnnnnnnnnnnnnnnnnnnnnnnnnnnnnnnnnnnnnnnnnnnnnnnnnnnnnnnnnnnnnnnnnnnnnnnnnnnnnnnnnnnnnnnnnnnnnnnnnnnnnnnnnnnnnnnnnnnnnnnnnnnnnnnnnnnnnnnnnnnnnnnnnnnnnnnnnnnnnnnnnnnnnnnnnnnnnnnnnnnnnnnnnnnnnnnnnnnnnnnnnnnnnnnnnnnnnnnnnnnnnnnnnnnnnnnnnnnnnnnnnnnnnnnnnnnnnnnnnnnnnnnnnnnnnnnnnnnnnnnnnnnnnnnnnnnnnnnnnnnnnnnnnnnnnnnnnnnnnnnnnnnnnnnnnnnnnnnnnnnnnnnnnnnnnnnnnnnnnnnnnnnnnnnnnnnnnnnnnnnnnnnnnnnnnnnnnnnnnnnnnnnnnnnnnnnnnnnnnnnnnnnnnnnnnnnnnnnnnnnnnnnnnnnnnnnnnnnnnnnnnnnnnnnnnnnnnnnnnnnnnnnnnnnnnnnnnnnnnnnnnnnnnnnnnnnnnnnnnnnnnnnnnnnnnnnnnnnnnnnnnnnnnnnnnnnnnnnnnnnnnnnnnnnnnnnnnnnnnnnnnnnnnnnnnnnnnnnnnnnnnnnnnnnnnnnnnnnnnnnnnnnnnnnnnnnnnnnnnnnnnnnnnnnnnnnnnnnnnnnnnnnnnnnnnnnnnnnnnnnnnnnnnnnnnnnnnnnnnnnnnnnnnnnnnnnnnnnnnnnnnnnnnnnnnnnnnnnnnnnnnnnnnnnnnnnnnnnnnnnnnnnnnnnnnnnnnnnnnnnnnnnnnnnnnnnnnnnnnnnnnnnnnnnnnnnnnnnnnnnnnnnnnnnnnnnnnnnnnnnnnnnnnnnnnnnnnnnnnnnnnnnnnnnnnnnnnnnnnnnnnnnnnnnnnnnnnnnnnnnnnnnnnnnnnnnnnnnnnnnnnnnnnnnnnnnnnnnnnnnnnnnnnnnnnnnnnnnnnnnnnnnnnnnnnnnnnnnnnnnnnnnnnnnnnnnnnnnnnnnnnnnnnnnnnnnnnnnnnnnnnnnnnnnnnnnnnnnnnnnnnnnnnnnnnnnnnnnnnnnnnnnnnnnnnnnnnnnnnnnnnnnnnnnnnnnnnnnnnnnnnnnnnnnnnnnnnnnnnnnnnnnnnnnnnnnnnnnnnnnnnnnnnnnnnnnnnnnnnnnnnnnnnnnnnnnnnnnnnnnnnnnnnnnnnnnnnnnnnnnnnnnnnnnnnnnnnnnnnnnnnnnnnnnnnnnnnnnnnnnnnnnnnnnnnnnnnnnnnnnnnnnnnnnnnnnnnnnnnnnnnnnnnnnnnnnnnnnnnnnnnnnnnnnnnnnnnnnnnnnnnnnnnnnnnnnnnnnnnnnnnnnnnnnnnnnnnnnnnnnnnnnnnnnnnnnnnnnnnnnnnnnnnnnnnnnnnnnnnnnnnnnnnnnnnnnnnnnnnnnnnnnnnnnnnnnnnnnnnnnnnnnnnnnnnnnnnnnnnnnnnnnnnnnnnnnnnnnnnnnnnnnnnnnnnnnnnnnnnnnnnnnnnnnnnnnnnnnnnnnnnnnnnnnnnnnnnnnnnnnnnnnnnnnnnnnnnnnnnnnnnnnnnnnnnnnnnnnnnnnnnnnnnnnnnnnnnnnnnnnnnnnnnnnnnnnnnnnnnnnnnnnnnnnnnnnnnnnnnnnnnnnnnnnnnnnnnnnnnnnnnnnnnnnnnnnnnnnnnnnnnnnnnnnnnnnnnnnnnnnnnnnnnnnnnnnnnnnnnnnnnnnnnnnnnnnnnnnnnnnnnnnnnnnnnnnnnnnnnnnnnnnnnnnnnnnnnnnnnnnnnnnnnnnnnnnnnnnnnnnnnnnnnnnnnnnnnnnnnnnnnnnnnnnnnnnnnnnnnnnnnnnnnnnnnnnnnnnnnnnnnnnnnnnnnnnnnnnnnnnnnnnnnnnnnnnnnnnnnnnnnnnnnnnnnnnnnnnnnnnnnnnnnnnnnnnnnnnnnnnnnnnnnnnnnnnnnnnnnnnnnnnnnnnnnnnnnnnnnnnnnnnnnnnnnnnnnnnnnnnnnnnnnnnnnnnnnnnnnnnnnnnnnnnnnnnnnnnnnnnnnnnnnnnnnnnnnnnnnnnnnnnnnnnnnnnnnnnnnnnnnnnnnnnnnnnnnnnnnnnnnnnnnnnnnnnnnnnnnnnnnnnnnnnnnnnnnnnnnnnnnnnnnnnnnnnnnnnnnnnnnnnnnnnnnnnnnnnnnnnnnnnnnnnnnnnnnnnnnnnnnnnnnnnnnnnnnnnnnnnnnnnnnnnnnnnnnnnnnnnnnnnnnnnnnnnnnnnnnnnnnnnnnnnnnnnnnnnnnnnnnnnnnnnnnnnnnnnnnnnnnnnnnnnnnnnnnnnnnnnnnnnnnnnnnnnnnnnnnnnnnnnnnnnnnnnnnnnnnnnnnnnnnnnnnnnnnnnnnnnnnnnnnnnnnnnnnnnnnnnnnnnnnnnnnnnnnnnnnnnnnnnnnnnnnnnnnnnnnnnnnnnnnnnnnnnnnnnnnnnnnnnnnnnnnnnnnnnnnnnnnnnnnnnnnnnnnnnnnnnnnnnnnnnnnnnnnnnnnnnnnnnnnnnnnnnnnnnnnnnnnnnnnnnnnnnnnnnnnnnnnnnnnnnnnnnnnnnnnnnnnnnnnnnnnnnnnnnnnnnnnnnnnnnnnnnnnnnnnnnnnnnnnnnnnnnnnnnnnnnnnnnnnnnnnnnnnnnnnnnnnnnnnnnnnnnnnnnnnnnnnnnnnnnnnnnnnnnnnnnnnnnnnnnnnnnnnnnnnnnnnnnnnnnnnnnnnnnnnnnnnnnnnnnnnnnnnnnnnnnnnnnnnnnnnnnnnnnnnnnnnnnnnnnnnnnnnnnnnnnnnnnnnnnnnnnnnnnnnnnnnnnnnnnnnnnnnnnnnnnnnnnnnnnnnnnnnnnnnnnnnnnnnnnnnnnnnnnnnnnnnnnnnnnnnnnnnnnnnnnnnnnnnnnnnnnnnnnnnnnnnnnnnnnnnnnnnnnnnnnnnnnnnnnnnnnnnnnnnnnnnnnnnnnnnnnnnnnnnnnnnnnnnnnnnnnnnnnnnnnnnnnnnnnnnnnnnnnnnnnnnnnnnnnnnnnnnnnnnnnnnnnnnnnnnnnnnnnnnnnnnnnnnnnnnnnnnnnnnnnnnnnnnnnnnnnnnnnnnnnnnnnnnnnnnnnnnnnnnnnnnnnnnnnnnnnnnnnnnnnnnnnnnnnnnnnnnnnnnnnnnnnnnnnnnnnnnnnnnnnnnnnnnnnnnnnnnnnnnnnnnnnnnnnnnnnnnnnnnnnnnnnnnnnnnnnnnnnnnnnnnnnnnnnnnnnnnnnnnnnnnnnnnnnnnnnnnnnnnnnnnnnnnnnnnnnnnnnnnnnnnnnnnnnnnnnnnnnnnnnnnnnnnnnnnnnnnnnnnnnnnnnnnnnnnnnnnnnnnnnnnnnnnnnnnnnnnnnnnnnnnnnnnnnnnnnnnnnnnnnnnnnnnnnnnnnnnnnnnnnnnnnnnnnnnnnnnnnnnnnnnnnnnnnnnnnnnnnnnnnnnnnnnnnnnnnnnnnnnnnnnnnnnnnnnnnnnnnnnnnnnnnnnnnnnnnnnnnnnnnnnnnnnnnnnnnnnnnnnnnnnnnnnnnnnnnnnnnnnnnnnnnnnnnnnnnnnnnnnnnnnnnnnnnnnnnnnnnnnnnnnnnnnnnnnnnnnnnnnnnnnnnnnnnnnnnnnnnnnnnnnnnnnnnnnnnnnnnnnnnnnnnnnnnnnnnnnnnnnnnnnnnnnnnnnnnnnnnnnnnnnnnnnnnnnnnnnnnnnnnnnnnnnnnnnnnnnnnnnnnnnnnnnnnnnnnnnnnnnnnnnnnnnnnnnnnnnnnnnnnnnnnnnnnnnnnnnnnnnnnnnnnnnnnnnnnnnnnnnnnnnnnnnnnnnnnnnnnnnnnnnnnnnnnnnnnnnnnnnnnnnnnnnnnnnnnnnnnnnnnnnnnnnnnnnnnnnnnnnnnnnnnnnnnnnnnnnnnnnnnnnnnnnnnnnnnnnnnnnnnnnnnnnnnnnnnnnnnnnnnnnnnnnnnnnnnnnnnnnnnnnnnnnnnnnnnnnnnnnnnnnnnnnnnnnnnnnnnnnnnnnnnnnnnnnnnnnnnnnnnnnnnnnnnnnnnnnnnnnnnnnnnnnnnnnnnnnnnnnnnnnnnnnnnnnnnnnnnnnnnnnnnnnnnnnnnnnnnnnnnnnnnnnnnnnnnnnnnnnnnnnnnnnnnnnnnnnnnnnnnnnnnnnnnnnnnnnnnnnnnnnnnnnnnnnnnnnnnnnnnnnnnnnnnnnnnnnnnnnnnnnnnnnnnnnnnnnnnnnnnnnnnnnnnnnnnnnnnnnnnnnnnnnnnnnnnnnnnnnnnnnnnnnnnnnnnnnnnnnnnnnnnnnnnnnnnnnnnnnnnnnnnnnnnnnnnnnnnnnnnnnnnnnnnnnnnnnnnnnnnnnnnnnnnnnnnnnnnnnnnnnnnnnnnnnnnnnnnnnnnnnnnnnnnnnnnnnnnnnnnnnnnnnnnnnnnnnnnnnnnnnnnnnnnnnnnnnnnnnnnnnnnnnnnnnnnnnnnnnnnnnnnnnnnnnnnnnnnnnnnnnnnnnnnnnnnnnnnnnnnnnnnnnnnnnnnnnnnnnnnnnnnnnnnnnnnnnnnnnnnnnnnnnnnnnnnnnnnnnnnnnnnnnnnnnnnnnnnnnnnnnnnnnnnnnnnnnnnnnnnnnnnnnnnnnnnnnnnnnnnnnnnnnnnnnnnnnnnnnnnnnnnnnnnnnnnnnnnnnnnnnnnnnnnnnnnnnnnnnnnnnnnnnnnnnnnnnnnnnnnnnnnnnnnnnnnnnnnnnnnnnnnnnnnnnnnnnnnnnnnnnnnnnnnnnnnnnnnnnnnnnnnnnnnnnnnnnnnnnnnnnnnnnnnnnnnnnnnnnnnnnnnnnnnnnnnnnnnnnnnnnnnnnnnnnnnnnnnnnnnnnnnnnnnnnnnnnnnnnnnnnnnnnnnnnnnnnnnnnnnnnnnnnnnnnnnnnnnnnnnnnnnnnnnnnnnnnnnnnnnnnnnnnnnnnnnnnnnnnnnnnnnnnnnnnnnnnnnnnnnnnnnnnnnnnnnnnnnnnnnnnnnnnnnnnnnnnnnnnnnnnnnnnnnnnnnnnnnnnnnnnnnnnnnnnnnnnnnnnnnnnnnnnnnnnnnnnnnnnnnnnnnnnnnnnnnnnnnnnnnnnnnnnnnnnnnnnnnnnnnnnnnnnnnnnnnnnnnnnnnnnnnnnnnnnnnnnnnnnnnnnnnnnnnnnnnnnnnnnnnnnnnnnnnnnnnnnnnnnnnnnnnnnnnnnnnnnnnnnnnnnnnnnnnnnnnnnnnnnnnnnnnnnnnnnnnnnnnnnnnnnnnnnnnnnnnnnnnnnnnnnnnnnnnnnnnnnnnnnnnnnnnnnnnnnnnnnnnnnnnnnnnnnnnnnnnnnnnnnnnnnnnnnnnnnnnnnnnnnnnnnnnnnnnnnnnnnnnnnnnnnnnnnnnnnnnnnnnnnnnnnnnnnnnnnnnnnnnnnnnnnnnnnnnnnnnnnnnnnnnnnnnnnnnnnnnnnnnnnnnnnnnnnnnnnnnnnnnnnnnnnnnnnnnnnnnnnnnnnnnnnnnnnnnnnnnnnnnnnnnnnnnnnnnnnnnnnnnnnnnnnnnnnnnnnnnnnnnnnnnnnnnnnnnnnnnnnnnnnnnnnnnnnnnnnnnnnnnnnnnnnnnnnnnnnnnnnnnnnnnnnnnnnnnnnnnnnnnnnnnnnnnnnnnnnnnnnnnnnnnnnnnnnnnnnnnnnnnnnnnnnnnnnnnnnnnnnnnnnnnnnnnnnnnnnnnnnnnnnnnnnnnnnnnnnnnnnnnnnnnnnnnnnnnnnnnnnnnnnnnnnnnnnnnnnnnnnnnnnnnnnnnnnnnnnnnnnnnnnnnnnnnnnnnnnnnnnnnnnnnnnnnnnnnnnnnnnnnnnnnnnnnnnnnnnnnnnnnnnnnnnnnnnnnnnnnnnnnnnnnnnnnnnnnnnnnnnnnnnnnnnnnnnnnnnnnnnnnnnnnnnnnnnnnnnnnnnnnnnnnnnnnnnnnnnnnnnnnnnnnnnnnnnnnnnnnnnnnnnnnnnnnnnnnnnnnnnnnnnnnnnnnnnnnnnnnnnnnnnnnnnnnnnnnnnnnnnnnnnnnnnnnnnnnnnnnnnnnnnnnnnnnnnnnnnnnnnnnnnnnnnnnnnnnnnnnnnnnnnnnnnnnnnnnnnnnnnnnnnnnnnnnnnnnnnnnnnnnnnnnnnnnnnnnnnnnnnnnnnnnnnnnnnnnnnnnnnnnnnnnnnnnnnnnnnnnnnnnnnnnnnnnnnnnnnnnnnnnnnnnnnnnnnnnnnnnnnnnnnnnnnnnnnnnnnnnnnnnnnnnnnnnnnnnnnnnnnnnnnnnnnnnnnnnnnnnnnnnnnnnnnnnnnnnnnnnnnnnnnnnnnnnnnnnnnnnnnnnnnnnnnnnnnnnnnnnnnnnnnnnnnnnnnnnnnnnnnnnnnnnnnnnnnnnnnnnnnnnnnnnnnnnnnnnnnnnnnnnnnnnnnnnnnnnnnnnnnnnnnnnnnnnnnnnnnnnnnnnnnnnnnnnnnnnnnnnnnnnnnnnnnnnnnnnnnnnnnnnnnnnnnnnnnnnnnnnnnnnnnnnnnnnnnnnnnnnnnnnnnnnnnnnnnnnnnnnnnnnnnnnnnnnnnnnnnnnnnnnnnnnnnnnnnnnnnnnnnnnnnnnnnnnnnnnnnnnnnnnnnnnnnnnnnnnnnnnnnnnnnnnnnnnnnnnnnnnnnnnnnnnnnnnnnnnnnnnnnnnnnnnnnnnnnnnnnnnnnnnnnnnnnnnnnnnnnnnnnnnnnnnnnnnnnnnnnnnnnnnnnnnnnnnnnnnnnnnnnnnnnnnnnnnnnnnnnnnnnnnnnnnnnnnnnnnnnnnnnnnnnnnnnnnnnnnnnnnnnnnnnnnnnnnnnnnnnnnnnnnnnnnnnnnnnnnnnnnnnnnnnnnnnnnnnnnnnnnnnnnnnnnnnnnnnnnnnnnnnnnnnnnnnnnnnnnnnnnnnnnnnnnnnnnnnnnnnnnnnnnnnnnnnnnnnnnnnnnnnnnnnnnnnnnnnnnnnnnnnnnnnnnnnnnnnnnnnnnnnnnnnnnnnnnnnnnnnnnnnnnnnnnnnnnnnnnnnnnnnnnnnnnnnnnnnnnnnnnnnnnnnnnnnnnnnnnnnnnnnnnnnnnnnnnnnnnnnnnnnnnnnnnnnnnnnnnnnnnnnnnnnnnnnnnnnnnnnnnnnnnnnnnnnnnnnnnnnnnnnnnnnnnnnnnnnnnnnnnnnnnnnnnnnnnnnnnnnnnnnnnnnnnnnnnnnnnnnnnnnnnnnnnnnnnnnnnnnnnnnnnnnnnnnnnnnnnnnnnnnnnnnnnnnnnnnnnnnnnnnnnnnnnnnnnnnnnnnnnnnnnnnnnnnnnnnnnnnnnnnnnnnnnnnnnnnnnnnnnnnnnnnnnnnnnnnnnnnnnnnnnnnnnnnnnnnnnnnnnnnnnnnnnnnnnnnnnnnnnnnnnnnnnnnnnnnnnnnnnnnnnnnnnnnnnnnnnnnnnnnnnnnnnnnnnnnnnnnnnnnnnnnnnnnnnnnnnnnnnnnnnnnnnnnnnnnnnnnnnnnnnnnnnnnnnnnnnnnnnnnnnnnnnnnnnnnnnnnnnnnnnnnnnnnnnnnnnnnnnnnnnnnnnnnnnnnnnnnnnnnnnnnnnnnnnnnnnnnnnnnnnnnnnnnnnnnnnnnnnnnnnnnnnnnnnnnnnnnnnnnnnnnnnnnnnnnnnnnnnnnnnnnnnnnnnnnnnnnnnnnnnnnnnnnnnnnnnnnnnnnnnnnnnnnnnnnnnnnnnnnnnnnnnnnnnnnnnnnnnnnnnnnnnnnnnnnnnnnnnnnnnnnnnnnnnnnnnnnnnnnnnnnnnnnnnnnnnnnnnnnnnnnnnnnnnnnnnnnnnnnnnnnnnnnnnnnnnnnnnnnnnnnnnnnnnnnnnnnnnnnnnnnnnnnnnnnnnnnnnnnnnnnnnnnnnnnnnnnnnnnnnnnnnnnnnnnnnnnnnnnnnnnnnnnnnnnnnnnnnnnnnnnnnnnnnnnnnnnnnnnnnnnnnnnnnnnnnnnnnnnnnnnnnnnnnnnnnnnnnnnnnnnnnnnnnnnnnnnnnnnnnnnnnnnnnnnnnnnnnnnnnnnnnnnnnnnnnnnnnnnnnnnnnnnnnnnnnnnnnnnnnnnnnnnnnnnnnnnnnnnnnnnnnnnnnnnnnnnnnnnnnnnnnnnnnnnnnnnnnnnnnnnnnnnnnnnnnnnnnnnnnnnnnnnnnnnnnnnnnnnnnnnnnnnnnnnnnnnnnnnnnnnnnnnnnnnnnnnnnnnnnnnnnnnnnnnnnnnnnnnnnnnnnnnnnnnnnnnnnnnnnnnnnnnnnnnnnnnnnnnnnnnnnnnnnnnnnnnnnnnnnnnnnnnnnnnnnnnnnnnnnnnnnnnnnnnnnnnnnnnnnnnnnnnnnnnnnnnnnnnnnnnnnnnnnnnnnnnnnnnnnnnnnnnnnnnnnnnnnnnnnnnnnnnnnnnnnnnnnnnnnnnnnnnnnnnnnnnnnnnnnnnnnnnnnnnnnnnnnnnnnnnnnnnnnnnnnnnnnnnnnnnnnnnnnnnnnnnnnnnnnnnnnnnnnnnnnnnnnnnnnnnnnnnnnnnnnnnnnnnnnnnnnnnnnnnnnnnnnnnnnnnnnnnnnnnnnnnnnnnnnnnnnnnnnnnnnnnnnnnnnnnnnnnnnnnnnnnnnnnnnnnnnnnnnnnnnnnnnnnnnnnnnnnnnnnnnnnnnnnnnnnnnnnnnnnnnnnnnnnnnnnnnnnnnnnnnnnnnnnnnnnnnnnnnnnnnnnnnnnnnnnnnnnnnnnnnnnnnnnnnnnnnnnnnnnnnnnnnnnnnnnnnnnnnnnnnnnnnnnnnnnnnnnnnnnnnnnnnnnnnnnnnnnnnnnnnnnnnnnnnnnnnnnnnnnnnnnnnnnnnnnnnnnnnnnnnnnnnnnnnnnnnnnnnnnnnnnnnnnnnnnnnnnnnnnnnnnnnnnnnnnnnnnnnnnnnnnnnnnnnnnnnnnnnnnnnnnnnnnnnnnnnnnnnnnnnnnnnnnnnnnnnnnnnnnnnnnnnnnnnnnnnnnnnnnnnnnnnnnnnnnnnnnnnnnnnnnnnnnnnnnnnnnnnnnnnnnnnnnnnnnnnnnnnnnnnnnnnnnnnnnnnnnnnnnnnnnnnnnnnnnnnnnnnnnnnnnnnnnnnnnnnnnnnnnnnnnnnnnnnnnnnnnnnnnnnnnnnnnnnnnnnnnnnnnnnnnnnnnnnnnnnnnnnnnnnnnnnnnnnnnnnnnnnnnnnnnnnnnnnnnnnnnnnnnnnnnnnnnnnnnnnnnnnnnnnnnnnnnnnnnnnnnnnnnnnnnnnnnnnnnnnnnnnnnnnnnnnnnnnnnnnnnnnnnnnnnnnnnnnnnnnnnnnnnnnnnnnnnnnnnnnnnnnnnnnnnnnnnnnnnnnnnnnnnnnnnnnnnnnnnnnnnnnnnnnnnnnnnnnnnnnnnnnnnnnnnnnnnnnnnnnnnnnnnnnnnnnnnnnnnnnnnnnnnnnnnnnnnnnnnnnnnnnnnnnnnnnnnnnnnnnnnnnnnnnnnnnnnnnnnnnnnnnnnnnnnnnnnnnnnnnnnnnnnnnnnnnnnnnnnnnnnnnnnnnnnnnnnnnnnnnnnnnnnnnnnnnnnnnnnnnnnnnnnnnnnnnnnnnnnnnnnnnnnnnnnnnnnnnnnnnnnnnnnnnnnnnnnnnnnnnnnnnnnnnnnnnnnnnnnnnnnnnnnnnnnnnnnnnnnnnnnnnnnnnnnnnnnnnnnnnnnnnnnnnnnnnnnnnnnnnnnnnnnnnnnnnnnnnnnnnnnnnnnnnnnnnnnnnnnnnnnnnnnnnnnnnnnnnnnnnnnnnnnnnnnnnnnnnnnnnnnnnnnnnnnnnnnnnnnnnnnnnnnnnnnnnnnnnnnnnnnnnnnnnnnnnnnnnnnnnnnnnnnnnnnnnnnnnnnnnnnnnnnnnnnnnnnnnnnnnnnnnnnnnnnnnnnnnnnnnnnnnnnnnnnnnnnnnnnnnnnnnnnnnnnnnnnnnnnnnnnnnnnnnnnnnnnnnnnnnnnnnnnnnnnnnnnnnnnnnnnnnnnnnnnnnnnnnnnnnnnnnnnnnnnnnnnnnnnnnnnnnnnnnnnnnnnnnnnnnnnnnnnnnnnnnnnnnnnnnnnnnnnnnnnnnnnnnnnnnnnnnnnnnnnnnnnnnnnnnnnnnnnnnnnnnnnnnnnnnnnnnnnnnnnnnnnnnnnnnnnnnnnnnnnnnnnnnnnnnnnnnnnnnnnnnnnnnnnnnnnnnnnnnnnnnnnnnnnnnnnnnnnnnnnnnnnnnnnnnnnnnnnnnnnnnnnnnnnnnnnnnnnnnnnnnnnnnnnnnnnnnnnnnnnnnnnnnnnnnnnnnnnnnnnnnnnnnnnnnnnnnnnnnnnnnnnnnnnnnnnnnnnnnnnnnnnnnnnnnnnnnnnnnnnnnnnnnnnnnnnnnnnnnnnnnnnnnnnnnnnnnnnnnnnnnnnnnnnnnnnnnnnnnnnnnnnnnnnnnnnnnnnnnnnnnnnnnnnnnnnnnnnnnnnnnnnnnnnnnnnnnnnnnnnnnnnnnnnnnnnnnnnnnnnnnnnnnnnnnnnnnnnnnnnnnnnnnnnnnnnnnnnnnnnnnnnnnnnnnnnnnnnnnnnnnnnnnnnnnnnnnnnnnnnnnnnnnnnnnnnnnnnnnnnnnnnnnnnnnnnnnnnnnnnnnnnnnnnnnnnnnnnnnnnnnnnnnnnnnnnnnnnnnnnnnnnnnnnnnnnnnnnnnnnnnnnnnnnnnnnnnnnnnnnnnnnnnnnnnnnnnnnnnnnnnnnnnnnnnnnnnnnnnnnnnnnnnnnnnnnnnnnnnnnnnnnnnnnnnnnnnnnnnnnnnnnnnnnnnnnnnnnnnnnnnnnnnnnnnnnnnnnnnnnnnnnnnnnnnnnnnnnnnnnnnnnnnnnnnnnnnnnnnnnnnnnnnnnnnnnnnnnnnnnnnnnnnnnnnnnnnnnnnnnnnnnnnnnnnnnnnnnnnnnnnnnnnnnnnnnnnnnnnnnnnnnnnnnnnnnnnnnnnnnnnnnnnnnnnnnnnnnnnnnnnnnnnnnnnnnnnnnnnnnnnnnnnnnnnnnnnnnnnnnnnnnnnnnnnnnnnnnnnnnnnnnnnnnnnnnnnnnnnnnnnnnnnnnnnnnnnnnnnnnnnnnnnnnnnnnnnnnnnnnnnnnnnnnnnnnnnnnnnnnnnnnnnnnnnnnnnnnnnnnnnnnnnnnnnnnnnnnnnnnnnnnnnnnnnnnnnnnnnnnnnnnnnnnnnnnnnnnnnnnnnnnnnnnnnnnnnnnnnnnnnnnnnnnnnnnnnnnnnnnnnnnnnnnnnnnnnnnnnnnnnnnnnnnnnnnnnnnnnnnnnnnnnnnnnnnnnnnnnnnnnnnnnnnnnnnnnnnnnnnnnnnnnnnnnnnnnnnnnnnnnnnnnnnnnnnnnnnnnnnnnnnnnnnnnnnnnnnnnnnnnnnnnnnnnnnnnnnnnnnnnnnnnnnnnnnnnnnnnnnnnnnnnnnnnnnnnnnnnnnnnnnnnnnnnnnnnnnnnnnnnnnnnnnnnnnnnnnnnnnnnnnnnnnnnnnnnnnnnnnnnnnnnnnnnnnnnnnnnnnnnnnnnnnnnnnnnnnnnnnnnnnnnnnnnnnnnnnnnnnnnnnnnnnnnnnnnnnnnnnnnnnnnnnnnnnnnnnnnnnnnnnnnnnnnnnnnnnnnnnnnnnnnnnnnnnnnnnnnnnnnnnnnnnnnnnnnnnnnnnnnnnnnnnnnnnnnnnnnnnnnnnnnnnnnnnnnnnnnnnnnnnnnnnnnnnnnnnnnnnnnnnnnnnnnnnnnnnnnnnnnnnnnnnnnnnnnnnnnnnnnnnnnnnnnnnnnnnnnnnnnnnnnnnnnnnnnnnnnnnnnnnnnnnnnnnnnnnnnnnnnnnnnnnnnnnnnnnnnnnnnnnnnnnnnnnnnnnnnnnnnnnnnnnnnnnnnnnnnnnnnnnnnnnnnnnnnnnnnnnnnnnnnnnnnnnnnnnnnnnnnnnnnnnnnnnnnnnnnnnnnnnnnnnnnnnnnnnnnnnnnnnnnnnnnnnnnnnnnnnnnnnnnnnnnnnnnnnnnnnnnnnnnnnnnnnnnnnnnnnnnnnnnnnnnnnnnnnnnnnnnnnnnnnnnnnnnnnnnnnnnnnnnnnnnnnnnnnnnnnnnnnnnnnnnnnnnnnnnnnnnnnnnnnnnnnnnnnnnnnnnnnnnnnnnnnnnnnnnnnnnnnnnnnnnnnnnnnnnnnnnnnnnnnnnnnnnnnnnnnnnnnnnnnnnnnnnnnnnnnnnnnnnnnnnnnnnnnnnnnnnnnnnnnnnnnnnnnnnnnnnnnnnnnnnnnnnnnnnnnnnnnnnnnnnnnnnnnnnnnnnnnnnnnnnnnnnnnnnnnnnnnnnnnnnnnnnnnnnnnnnnnnnnnnnnnnnnnnnnnnnnnnnnnnnnnnnnnnnnnnnnnnnnnnnnnnnnnnnnnnnnnnnnnnnnnnnnnnnnnnnnnnnnnnnnnnnnnnnnnnnnnnnnnnnnnnnnnnnnnnnnnnnnnnnnnnnnnnnnnnnnnnnnnnnnnnnnnnnnnnnnnnnnnnnnnnnnnnnnnnnnnnnnnnnnnnnnnnnnnnnnnnnnnnnnnnnnnnnnnnnnnnnnnnnnnnnnnnnnnnnnnnnnnnnnnnnnnnnnnnnnnnnnnnnnnnnnnnnnnnnnnnnnnnnnnnnnnnnnnnnnnnnnnnnnnnnnnnnnnnnnnnnnnnnnnnnnnnnnnnnnnnnnnnnnnnnnnnnnnnnnnnnnnnnnnnnnnnnnnnnnnnnnnnnnnnnnnnnnnnnnnnnnnnnnnnnnnnnnnnnnnnnnnnnnnnnnnnnnnnnnnnnnnnnnnnnnnnnnnnnnnnnnnnnnnnnnnnnnnnnnnnnnnnnnnnnnnnnnnnnnnnnnnnnnnnnnnnnnnnnnnnnnnnnnnnnnnnnnnnnnnnnnnnnnnnnnnnnnnnnnnnnnnnnnnnnnnnnnnnnnnnnnnnnnnnnnnnnnnnnnnnnnnnnnnnnnnnnnnnnnnnnnnnnnnnnnnnnnnnnnnnnnnnnnnnnnnnnnnnnnnnnnnnnnnnnnnnnnnnnnnnnnnnnnnnnnnnnnnnnnnnnnnnnnnnnnnnnnnnnnnnnnnnnnnnnnnnnnnnnnnnnnnnnnnnnnnnnnnnnnnnnnnnnnnnnnnnnnnnnnnnnnnnnnnnnnnnnnnnnnnnnnnnnnnnnnnnnnnnnnnnnnnnnnnnnnnnnnnnnnnnnnnnnnnnnnnnnnnnnnnnnnnnnnnnnnnnnnnnnnnnnnnnnnnnnnnnnnnnnnnnnnnnnnnnnnnnnnnnnnnnnnnnnnnnnnnnnnnnnnnnnnnnnnnnnnnnnnnnnnnnnnnnnnnnnnnnnnnnnnnnnnnnnnnnnnnnnnnnnnnnnnnnnnnnnnnnnnnnnnnnnnnnnnnnnnnnnnnnnnnnnnnnnnnnnnnnnnnnnnnnnnnnnnnnnnnnnnnnnnnnnnnnnnnnnnnnnnnnnnnnnnnnnnnnnnnnnnnnnnnnnnnnnnnnnnnnnnnnnnnnnnnnnnnnnnnnnnnnnnnnnnnnnnnnnnnnnnnnnnnnnnnnnnnnnnnnnnnnnnnnnnnnnnnnnnnnnnnnnnnnnnnnnnnnnnnnnnnnnnnnnnnnnnnnnnnnnnnnnnnnnnnnnnnnnnnnnnnnnnnnnnnnnnnnnnnnnnnnnnnnnnnnnnnnnnnnnnnnnnnnnnnnnnnnnnnnnnnnnnnnnnnnnnnnnnnnnnnnnnnnnnnnnnnnnnnnnnnnnnnnnnnnnnnnnnnnnnnnnnnnnnnnnnnnnnnnnnnnnnnnnnnnnnnnnnnnnnnnnnnnnnnnnnnnnnnnnnnnnnnnnnnnnnnnnnnnnnnnnnnnnnnnnnnnnnnnnnnnnnnnnnnnnnnnnnnnnnnnnnnnnnnnnnnnnnnnnnnnnnnnnnnnnnnnnnnnnnnnnnnnnnnnnnnnnnnnnnnnnnnnnnnnnnnnnnnnnnnnnnnnnnnnnnnnnnnnnnnnnnnnnnnnnnnnnnnnnnnnnnnnnnnnnnnnnnnnnnnnnnnnnnnnnnnnnnnnnnnnnnnnnnnnnnnnnnnnnnnnnnnnnnnnnnnnnnnnnnnnnnnnnnnnnnnnnnnnnnnnnnnnnnnnnnnnnnnnnnnnnnnnnnnnnnnnnnnnnnnnnnnnnnnnnnnnnnnnnnnnnnnnnnnnnnnnnnnnnnnnnnnnnnnnnnnnnnnnnnnnnnnnnnnnnnnnnnnnnnnnnnnnnnnnnnnnnnnnnnnnnnnnnnnnnnnnnnnnnnnnnnnnnnnnnnnnnnnnnnnnnnnnnnnnnnnnnnnnnnnnnnnnnnnnnnnnnnnnnnnnnnnnnnnnnnnnnnnnnnnnnnnnnnnnnnnnnnnnnnnnnnnnnnnnnnnnnnnnnnnnnnnnnnnnnnnnnnnnnnnnnnnnnnnnnnnnnnnnnnnnnnnnnnnnnnnnnnnnnnnnnnnnnnnnnnnnnnnnnnnnnnnnnnnnnnnnnnnnnnnnnnnnnnnnnnnnnnnnnnnnnnnnnnnnnnnnnnnnnnnnnnnnnnnnnnnnnnnnnnnnnnnnnnnnnnnnnnnnnnnnnnnnnnnnnnnnnnnnnnnnnnnnnnnnnnnnnnnnnnnnnnnnnnnnnnnnnnnnnnnnnnnnnnnnnnnnnnnnnnnnnnnnnnnnnnnnnnnnnnnnnnnnnnnnnnnnnnnnnnnnnnnnnnnnnnnnnnnnnnnnnnnnnnnnnnnnnnnnnnnnnnnnnnnnnnnnnnnnnnnnnnnnnnnnnnnnnnnnnnnnnnnnnnnnnnnnnnnnnnnnnnnnnnnnnnnnnnnnnnnnnnnnnnnnnnnnnnnnnnnnnnnnnnnnnnnnnnnnnnnnnnnnnnnnnnnnnnnnnnnnnnnnnnnnnnnnnnnnnnnnnnnnnnnnnnnnnnnnnnnnnnnnnnnnnnnnnnnnnnnnnnnnnnnnnnnnnnnnnnnnnnnnnnnnnnnnnnnnnnnnnnnnnnnnnnnnnnnnnnnnnnnnnnnnnnnnnnnnnnnnnnnnnnnnnnnnnnnnnnnnnnnnnnnnnnnnnnnnnnnnnnnnnnnnnnnnnnnnnnnnnnnnnnnnnnnnnnnnnnnnnnnnnnnnnnnnnnnnnnnnnnnnnnnnnnnnnnnnnnnnnnnnnnnnnnnnnnnnnnnnnnnnnnnnnnnnnnnnnnnnnnnnnnnnnnnnnnnnnnnnnnnnnnnnnnnnnnnnnnnnnnnnnnnnnnnnnnnnnnnnnnnnnnnnnnnnnnnnnnnnnnnnnnnnnnnnnnnnnnnnnnnnnnnnnnnnnnnnnnnnnnnnnnnnnnnnnnnnnnnnnnnnnnnnnnnnnnnnnnnnnnnnnnnnnnnnnnnnnnnnnnnnnnnnnnnnnnnnnnnnnnnnnnnnnnnnnnnnnnnnnnnnnnnnnnnnnnnnnnnnnnnnnnnnnnnnnnnnnnnnnnnnnnnnnnnnnnnnnnnnnnnnnnnnnnnnnnnnnnnnnnnnnnnnnnnnnnnnnnnnnnnnnnnnnnnnnnnnnnnnnnnnnnnnnnnnnnnnnnnnnnnnnnnnnnnnnnnnnnnnnnnnnnnnnnnnnnnnnnnnnnnnnnnnnnnnnnnnnnnnnnnnnnnnnnnnnnnnnnnnnnnnnnnnnnnnnnnnnnnnnnnnnnnnnnnnnnnnnnnnnnnnnnnnnnnnnnnnnnnnnnnnnnnnnnnnnnnnnnnnnnnnnnnnnnnnnnnnnnnnnnnnnnnnnnnnnnnnnnnnnnnnnnnnnnnnnnnnnnnnnnnnnnnnnnnnnnnnnnnnnnnnnnnnnnnnnnnnnnnnnnnnnnnnnnnnnnnnnnnnnnnnnnnnnnnnnnnnnnnnnnnnnnnnnnnnnnnnnnnnnnnnnnnnnnnnnnnnnnnnnnnnnnnnnnnnnnnnnnnnnnnnnnnnnnnnnnnnnnnnnnnnnnnnnnnnnnnnnnnnnnnnnnnnnnnnnnnnnnnnnnnnnnnnnnnnnnnnnnnnnnnnnnnnnnnnnnnnnnnnnnnnnnnnnnnnnnnnnnnnnnnnnnnnnnnnnnnnnnnnnnnnnnnnnnnnnnnnnnnnnnnnnnnnnnnnnnnnnnnnnnnnnnnnnnnnnnnnnnnnnnnnnnnnnnnnnnnnnnnnnnnnnnnnnnnnnnnnnnnnnnnnnnnnnnnnnnnnnnnnnnnnnnnnnnnnnnnnnnnnnnnnnnnnnnnnnnnnnnnnnnnnnnnnnnnnnnnnnnnnnnnnnnnnnnnnnnnnnnnnnnnnnnnnnnnnnnnnnnnnnnnnnnnnnnnnnnnnnnnnnnnnnnnnnnnnnnnnnnnnnnnnnnnnnnnnnnnnnnnnnnnnnnnnnnnnnnnnnnnnnnnnnnnnnnnnnnnnnnnnnnnnnnnnnnnnnnnnnnnnnnnnnnnnnnnnnnnnnnnnnnnnnnnnnnnnnnnnnnnnnnnnnnnnnnnnnnnnnnnnnnnnnnnnnnnnnnnnnnnnnnnnnnnnnnnnnnnnnnnnnnnnnnnnnnnnnnnnnnnnnnnnnnnnnnnnnnnnnnnnnnnnnnnnnnnnnnnnnnnnnnnnnnnnnnnnnnnnnnnnnnnnnnnnnnnnnnnnnnnnnnnnnnnnnnnnnnnnnnnnnnnnnnnnnnnnnnnnnnnnnnnnnnnnnnnnnnnnnnnnnnnnnnnnnnnnnnnnnnnnnnnnnnnnnnnnnnnnnnnnnnnnnnnnnnnnnnnnnnnnnnnnnnnnnnnnnnnnnnnnnnnnnnnnnnnnnnnnnnnnnnnnnnnnnnnnnnnnnnnnnnnnnnnnnnnnnnnnnnnnnnnnnnnnnnnnnnnnnnnnnnnnnnnnnnnnnnnnnnnnnnnnnnnnnnnnnnnnnnnnnnnnnnnnnnnnnnnnnnnnnnnnnnnnnnnnnnnnnnnnnnnnnnnnnnnnnnnnnnnnnnnnnnnnnnnnnnnnnnnnnnnnnnnnnnnnnnnnnnnnnnnnnnnnnnnnnnnnnnnnnnnnnnnnnnnnnnnnnnnnnnnnnnnnnnnnnnnnnnnnnnnnnnnnnnnnnnnnnnnnnnnnnnnnnnnnnnnnnnnnnnnnnnnnnnnnnnnnnnnnnnnnnnnnnnnnnnnnnnnnnnnnnnnnnnnnnnnnnnnnnnnnnnnnnnnnnnnnnnnnnnnnnnnnnnnnnnnnnnnnnnnnnnnnnnnnnnnnnnnnnnnnnnnnnnnnnnnnnnnnnnnnnnnnnnnnnnnnnnnnnnnnnnnnnnnnnnnnnnnnnnnnnnnnnnnnnnnnnnnnnnnnnnnnnnnnnnnnnnnnnnnnnnnnnnnnnnnnnnnnnnnnnnnnnnnnnnnnnnnnnnnnnnnnnnnnnnnnnnnnnnnnnnnnnnnnnnnnnnnnnnnnnnnnnnnnnnnnnnnnnnnnnnnnnnnnnnnnnnnnnnnnnnnnnnnnnnnnnnnnnnnnnnnnnnnnnnnnnnnnnnnnnnnnnnnnnnnnnnnnnnnnnnnnnnnnnnnnnnnnnnnnnnnnnnnnnnnnnnnnnnnnnnnnnnnnnnnnnnnnnnnnnnnnnnnnnnnnnnnnnnnnnnnnnnnnnnnnnnnnnnnnnnnnnnnnnnnnnnnnnnnnnnnnnnnnnnnnnnnnnnnnnnnnnnnnnnnnnnnnnnnnnnnnnnnnnnnnnnnnnnnnnnnnnnnnnnnnnnnnnnnnnnnnnnnnnnnnnnnnnnnnnnnnnnnnnnnnnnnnnnnnnnnnnnnnnnnnnnnnnnnnnnnnnnnnnnnnnnnnnnnnnnnnnnnnnnnnnnnnnnnnnnnnnnnnnnnnnnnnnnnnnnnnnnnnnnnnnnnnnnnnnnnnnnnnnnnnnnnnnnnnnnnnnnnnnnnnnnnnnnnnnnnnnnnnnnnnnnnnnnnnnnnnnnnnnnnnnnnnnnnnnnnnnnnnnnnnnnnnnnnnnnnnnnnnnnnnnnnnnnnnnnnnnnnnnnnnnnnnnnnnnnnnnnnnnnnnnnnnnnnnnnnnnnnnnnnnnnnnnnnnnnnnnnnnnnnnnnnnnnnnnnnnnnnnnnnnnnnnnnnnnnnnnnnnnnnnnnnnnnnnnnnnnnnnnnnnnnnnnnnnnnnnnnnnnnnnnnnnnnnnnnnnnnnnnnnnnnnnnnnnnnnnnnnnnnnnnnnnnnnnnnnnnnnnnnnnnnnnnnnnnnnnnnnnnnnnnnnnnnnnnnnnnnnnnnnnnnnnnnnnnnnnnnnnnnnnnnnnnnnnnnnnnnnnnnnnnnnnnnnnnnnnnnnnnnnnnnnnnnnnnnnnnnnnnnnnnnnnnnnnnnnnnnnnnnnnnnnnnnnnnnnnnnnnnnnnnnnnnnnnnnnnnnnnnnnnnnnnnnnnnnnnnnnnnnnnnnnnnnnnnnnnnnnnnnnnnnnnnnnnnnnnnnnnnnnnnnnnnnnnnnnnnnnnnnnnnnnnnnnnnnnnnnnnnnnnnnnnnnnnnnnnnnnnnnnnnnnnnnnnnnnnnnnnnnnnnnnnnnnnnnnnnnnnnnnnnnnnnnnnnnnnnnnnnnnnnnnnnnnnnnnnnnnnnnnnnnnnnnnnnnnnnnnnnnnnnnnnnnnnnnnnnnnnnnnnnnnnnnnnnnnnnnnnnnnnnnnnnnnnnnnnnnnnnnnnnnnnnnnnnnnnnnnnnnnnnnnnnnnnnnnnnnnnnnnnnnnnnnnnnnnnnnnnnnnnnnnnnnnnnnnnnnnnnnnnnnnnnnnnnnnnnnnnnnnnnnnnnnnnnnnnnnnnnnnnnnnnnnnnnnnnnnnnnnnnnnnnnnnnnnnnnnnnnnnnnnnnnnnnnnnnnnnnnnnnnnnnnnnnnnnnnnnnnnnnnnnnnnnnnnnnnnnnnnnnnnnnnnnnnnnnnnnnnnnnnnnnnnnnnnnnnnnnnnnnnnnnnnnnnnnnnnnnnnnnnnnnnnnnnnnnnnnnnnnnnnnnnnnnnnnnnnnnnnnnnnnnnnnnnnnnnnnnnnnnnnnnnnnnnnnnnnnnnnnnnnnnnnnnnnnnnnnnnnnnnnnnnnnnnnnnnnnnnnnnnnnnnnnnnnnnnnnnnnnnnnnnnnnnnnnnnnnnnnnnnnnnnnnnnnnnnnnnnnnnnnnnnnnnnnnnnnnnnnnnnnnnnnnnnnnnnnnnnnnnnnnnnnnnnnnnnnnnnnnnnnnnnnnnnnnnnnnnnnnnnnnnnnnnnnnnnnnnnnnnnnnnnnnnnnnnnnnnnnnnnnnnnnnnnnnnnnnnnnnnnnnnnnnnnnnnnnnnnnnnnnnnnnnnnnnnnnnnnnnnnnnnnnnnnnnnnnnnnnnnnnnnnnnnnnnnnnnnnnnnnnnnnnnnnnnnnnnnnnnnnnnnnnnnnnnnnnnnnnnnnnnnnnnnnnnnnnnnnnnnnnnnnnnnnnnnnnnnnnnnnnnnnnnnnnnnnnnnnnnnnnnnnnnnnnnnnnnnnnnnnnnnnnnnnnnnnnnnnnnnnnnnnnnnnnnnnnnnnnnnnnnnnnnnnnnnnnnnnnnnnnnnnnnnnnnnnnnnnnnnnnnnnnnnnnnnnnnnnnnnnnnnnnnnnnnnnnnnnnnnnnnnnnnnnnnnnnnnnnnnnnnnnnnnnnnnnnnnnnnnnnnnnnnnnnnnnnnnnnnnnnnnnnnnnnnnnnnnnnnnnnnnnnnnnnnnnnnnnnnnnnnnnnnnnnnnnnnnnnnnnnnnnnnnnnnnnnnnnnnnnnnnnnnnnnnnnnnnnnnnnnnnnnnnnnnnnnnnnnnnnnnnnnnnnnnnnnnnnnnnnnnnnnnnnnnnnnnnnnnnnnnnnnnnnnnnnnnnnnnnnnnnnnnnnnnnnnnnnnnnnnnnnnnnnnnnnnnnnnnnnnnnnnnnnnnnnnnnnnnnnnnnnnnnnnnnnnnnnnnnnnnnnnnnnnnnnnnnnnnnnnnnnnnnnnnnnnnnnnnnnnnnnnnnnnnnnnnnnnnnnnnnnnnnnnnnnnnnnnnnnnnnnnnnnnnnnnnnnnnnnnnnnnnnnnnnnnnnnnnnnnnnnnnnnnnnnnnnnnnnnnnnnnnnnnnnnnnnnnnnnnnnnnnnnnnnnnnnnnnnnnnnnnnnnnnnnnnnnnnnnnnnnnnnnnnnnnnnnnnnnnnnnnnnnnnnnnnnnnnnnnnnnnnnnnnnnnnnnnnnnnnnnnnnnnnnnnnnnnnnnnnnnnnnnnnnnnnnnnnnnnnnnnnnnnnnnnnnnnnnnnnnnnnnnnnnnnnnnnnnnnnnnnnnnnnnnnnnnnnnnnnnnnnnnnnnnnnnnnnnnnnnnnnnnnnnnnnnnnnnnnnnnnnnnnnnnnnnnnnnnnnnnnnnnnnnnnnnnnnnnnnnnnnnnnnnnnnnnnnnnnnnnnnnnnnnnnnnnnnnnnnnnnnnnnnnnnnnnnnnnnnnnnnnnnnnnnnnnnnnnnnnnnnnnnnnnnnnnnnnnnnnnnnnnnnnnnnnnnnnnnnnnnnnnnnnnnnnnnnnnnnnnnnnnnnnnnnnnnnnnnnnnnnnnnnnnnnnnnnnnnnnnnnnnnnnnnnnnnnnnnnnnnnnnnnnnnnnnnnnnnnnnnnnnnnnnnnnnnnnnnnnnnnnnnnnnnnnnnnnnnnnnnnnnnnnnnnnnnnnnnnnnnnnnnnnnnnnnnnnnnnnnnnnnnnnnnnnnnnnnnnnnnnnnnnnnnnnnnnnnnnnnnnnnnnnnnnnnnnnnnnnnnnnnnnnnnnnnnnnnnnnnnnnnnnnnnnnnnnnnnnnnnnnnnnnnnnnnnnnnnnnnnnnnnnnnnnnnnnnnnnnnnnnnnnnnnnnnnnnnnnnnnnnnnnnnnnnnnnnnnnnnnnnnnnnnnnnnnnnnnnnnnnnnnnnnnnnnnnnnnnnnnnnnnnnnnnnnnnnnnnnnnnnnnnnnnnnnnnnnnnnnnnnnnnnnnnnnnnnnnnnnnnnnnnnnnnnnnnnnnnnnnnnnnnnnnnnnnnnnnnnnnnnnnnnnnnnnnnnnnnnnnnnnnnnnnnnnnnnnnnnnnnnnnnnnnnnnnnnnnnnnnnnnnnnnnnnnnnnnnnnnnnnnnnnnnnnnnnnnnnnnnnnnnnnnnnnnnnnnnnnnnnnnnnnnnnnnnnnnnnnnnnnnnnnnnnnnnnnnnnnnnnnnnnnnnnnnnnnnnnnnnnnnnnnnnnnnnnnnnnnnnnnnnnnnnnnnnnnnnnnnnnnnnnnnnnnnnnnnnnnnnnnnnnnnnnnnnnnnnnnnnnnnnnnnnnnnnnnnnnnnnnnnnnnnnnnnnnnnnnnnnnnnnnnnnnnnnnnnnnnnnnnnnnnnnnnnnnnnnnnnnnnnnnnnnnnnnnnnnnnnnnnnnnnnnnnnnnnnnnnnnnnnnnnnnnnnnnnnnnnnnnnnnnnnnnnnnnnnnnnnnnnnnnnnnnnnnnnnnnnnnnnnnnnnnnnnnnnnnnnnnnnnnnnnnnnnnnnnnnnnnnnnnnnnnnnnnnnnnnnnnnnnnnnnnnnnnnnnnnnnnnnnnnnnnnnnnnnnnnnnnnnnnnnnnnnnnnnnnnnnnnnnnnnnnnnnnnnnnnnnnnnnnnnnnnnnnnnnnnnnnnnnnnnnnnnnnnnnnnnnnnnnnnnnnnnnnnnnnnnnnnnnnnnnnnnnnnnnnnnnnnnnnnnnnnnnnnnnnnnnnnnnnnnnnnnnnnnnnnnnnnnnnnnnnnnnnnnnnnnnnnnnnnnnnnnnnnnnnnnnnnnnnnnnnnnnnnnnnnnnnnnnnnnnnnnnnnnnnnnnnnnnnnnnnnnnnnnnnnnnnnnnnnnnnnnnnnnnnnnnnnnnnnnnnnnnnnnnnnnnnnnnnnnnnnnnnnnnnnnnnnnnnnnnnnnnnnnnnnnnnnnnnnnnnnnnnnnnnnnnnnnnnnnnnnnnnnnnnnnnnnnnnnnnnnnnnnnnnnnnnnnnnnnnnnnnnnnnnnnnnnnnnnnnnnnnnnnnnnnnnnnnnnnnnnnnnnnnnnnnnnnnnnnnnnnnnnnnnnnnnnnnnnnnnnnnnnnnnnnnnnnnnnnnnnnnnnnnnnnnnnnnnnnnnnnnnnnnnnnnnnnnnnnnnnnnnnnnnnnnnnnnnnnnnnnnnnnnnnnnnnnnnnnnnnnnnnnnnnnnnnnnnnnnnnnnnnnnnnnnnnnnnnnnnnnnnnnnnnnnnnnnnnnnnnnnnnnnnnnnnnnnnnnnnnnnnnnnnnnnnnnnnnnnnnnnnnnnnnnnnnnnnnnnnnnnnnnnnnnnnnnnnnnnnnnnnnnnnnnnnnnnnnnnnnnnnnnnnnnnnnnnnnnnnnnnnnnnnnnnnnnnnnnnnnnnnnnnnnnnnnnnnnnnnnnnnnnnnnnnnnnnnnnnnnnnnnnnnnnnnnnnnnnnnnnnnnnnnnnnnnnnnnnnnnnnnnnnnnnnnnnnnnnnnnnnnnnnnnnnnnnnnnnnnnnnnnnnnnnnnnnnnnnnnnnnnnnnnnnnnnnnnnnnnnnnnnnnnnnnnnnnnnnnnnnnnnnnnnnnnnnnnnnnnnnnnnnnnnnnnnnnnnnnnnnnnnnnnnnnnnnnnnnnnnnnnnnnnnnnnnnnnnnnnnnnnnnnnnnnnnnnnnnnnnnnnnnnnnnnnnnnnnnnnnnnnnnnnnnnnnnnnnnnnnnnnnnnnnnnnnnnnnnnnnnnnnnnnnnnnnnnnnnnnnnnnnnnnnnnnnnnnnnnnnnnnnnnnnnnnnnnnnnnnnnnnnnnnnnnnnnnnnnnnnnnnnnnnnnnnnnnnnnnnnnnnnnnnnnnnnnnnnnnnnnnnnnnnnnnnnnnnnnnnnnnnnnnnnnnnnnnnnnnnnnnnnnnnnnnnnnnnnnnnnnnnnnnnnnnnnnnnnnnnnnnnnnnnnnnnnnnnnnnnnnnnnnnnnnnnnnnnnnnnnnnnnnnnnnnnnnnnnnnnnnnnnnnnnnnnnnnnnnnnnnnnnnnnnnnnnnnnnnnnnnnnnnnnnnnnnnnnnnnnnnnnnnnnnnnnnnnnnnnnnnnnnnnnnnnnnnnnnnnnnnnnnnnnnnnnnnnnnnnnnnnnnnnnnnnnnnnnnnnnnnnnnnnnnnnnnnnnnnnnnnnnnnnnnnnnnnnnnnnnnnnnnnnnnnnnnnnnnnnnnnnnnnnnnnnnnnnnnnnnnnnnnnnnnnnnnnnnnnnnnnnnnnnnnnnnnnnnnnnnnnnnnnnnnnnnnnnnnnnnnnnnnnnnnnnnnnnnnnnnnnnnnnnnnnnnnnnnnnnnnnnnnnnnnnnnnnnnnnnnnnnnnnnnnnnnnnnnnnnnnnnnnnnnnnnnnnnnnnnnnnnnnnnnnnnnnnnnnnnnnnnnnnnnnnnnnnnnnnnnnnnnnnnnnnnnnnnnnnnnnnnnnnnnnnnnnnnnnnnnnnnnnnnnnnnnnnnnnnnnnnnnnnnnnnnnnnnnnnnnnnnnnnnnnnnnnnnnnnnnnnnnnnnnnnnnnnnnnnnnnnnnnnnnnnnnnnnnnnnnnnnnnnnnnnnnnnnnnnnnnnnnnnnnnnnnnnnnnnnnnnnnnnnnnnnnnnnnnnnnnnnnnnnnnnnnnnnnnnnnnnnnnnnnnnnnnnnnnnnnnnnnnnnnnnnnnnnnnnnnnnnnnnnnnnnnnnnnnnnnnnnnnnnnnnnnnnnnnnnnnnnnnnnnnnnnnnnnnnnnnnnnnnnnnnnnnnnnnnnnnnnnnnnnnnnnnnnnnnnnnnnnnnnnnnnnnnnnnnnnnnnnnnnnnnnnnnnnnnnnnnnnnnnnnnnnnnnnnnnnnnnnnnnnnnnnnnnnnnnnnnnnnnnnnnnnnnnnnnnnnnnnnnnnnnnnnnnnnnnnnnnnnnnnnnnnnnnnnnnnnnnnnnnnnnnnnnnnnnnnnnnnnnnnnnnnnnnnnnnnnnnnnnnnnnnnnnnnnnnnnnnnnnnnnnnnnnnnnnnnnnnnnnnnnnnnnnnnnnnnnnnnnnnnnnnnnnnnnnnnnnnnnnnnnnnnnnnnnnnnnnnnnnnnnnnnnnnnnnnnnnnnnnnnnnnnnnnnnnnnnnnnnnnnnnnnnnnnnnnnnnnnnnnnnnnnnnnnnnnnnnnnnnnnnnnnnnnnnnnnnnnnnnnnnnnnnnnnnnnnnnnnnnnnnnnnnnnnnnnnnnnnnnnnnnnnnnnnnnnnnnnnnnnnnnnnnnnnnnnnnnnnnnnnnnnnnnnnnnnnnnnnnnnnnnnnnnnnnnnnnnnnnnnnnnnnnnnnnnnnnnnnnnnnnnnnnnnnnnnnnnnnnnnnnnnnnnnnnnnnnnnnnnnnnnnnnnnnnnnnnnnnnnnnnnnnnnnnnnnnnnnnnnnnnnnnnnnnnnnnnnnnnnnnnnnnnnnnnnnnnnnnnnnnnnnnnnnnnnnnnnnnnnnnnnnnnnnnnnnnnnnnnnnnnnnnnnnnnnnnnnnnnnnnnnnnnnnnnnnnnnnnnnnnnnnnnnnnnnnnnnnnnnnnnnnnnnnnnnnnnnnnnnnnnnnnnnnnnnnnnnnnnnnnnnnnnnnnnnnnnnnnnnnnnnnnnnnnnnnnnnnnnnnnnnnnnnnnnnnnnnnnnnnnnnnnnnnnnnnnnnnnnnnnnnnnnnnnnnnnnnnnnnnnnnnnnnnnnnnnnnnnnnnnnnnnnnnnnnnnnnnnnnnnnnnnnnnnnnnnnnnnnnnnnnnnnnnnnnnnnnnnnnnnnnnnnnnnnnnnnnnnnnnnnnnnnnnnnnnnnnnnnnnnnnnnnnnnnnnnnnnnnnnnnnnnnnnnnnnnnnnnnnnnnnnnnnnnnnnnnnnnnnnnnnnnnnnnnnnnnnnnnnnnnnnnnnnnnnnnnnnnnnnnnnnnnnnnnnnnnnnnnnnnnnnnnnnnnnnnnnnnnnnnnnnnnnnnnnnnnnnnnnnnnnnnnnnnnnnnnnnnnnnnnnnnnnnnnnnnnnnnnnnnnnnnnnnnnnnnnnnnnnnnnnnnnnnnnnnnnnnnnnnnnnnnnnnnnnnnnnnnnnnnnnnnnnnnnnnnnnnnnnnnnnnnnnnnnnnnnnnnnnnnnnnnnnnnnnnnnnnnnnnnnnnnnnnnnnnnnnnnnnnnnnnnnnnnnnnnnnnnnnnnnnnnnnnnnnnnnnnnnnnnnnnnnnnnnnnnnnnnnnnnnnnnnnnnnnnnnnnnnnnnnnnnnnnnnnnnnnnnnnnnnnnnnnnnnnnnnnnnnnnnnnnnnnnnnnnnnnnnnnnnnnnnnnnnnnnnnnnnnnnnnnnnnnnnnnnnnnnnnnnnnnnnnnnnnnnnnnnnnnnnnnnnnnnnnnnnnnnnnnnnnnnnnnnnnnnnnnnnnnnnnnnnnnnnnnnnnnnnnnnnnnnnnnnnnnnnnnnnnnnnnnnnnnnnnnnnnnnnnnnnnnnnnnnnnnnnnnnnnnnnnnnnnnnnnnnnnnnnnnnnnnnnnnnnnnnnnnnnnnnnnnnnnnnnnnnnnnnnnnnnnnnnnnnnnnnnnnnnnnnnnnnnnnnnnnnnnnnnnnnnnnnnnnnnnnnnnnnnnnnnnnnnnnnnnnnnnnnnnnnnnnnnnnnnnnnnnnnnnnnnnnnnnnnnnnnnnnnnnnnnnnnnnnnnnnnnnnnnnnnnnnnnnnnnnnnnnnnnnnnnnnnnnnnnnnnnnnnnnnnnnnnnnnnnnnnnnnnnnnnnnnnnnnnnnnnnnnnnnnnnnnnnnnnnnnnnnnnnnnnnnnnnnnnnnnnnnnnnnnnnnnnnnnnnnnnnnnnnnnnnnnnnnnnnnnnnnnnnnnnnnnnnnnnnnnnnnnnnnnnnnnnnnnnnnnnnnnnnnnnnnnnnnnnnnnnnnnnnnnnnnnnnnnnnnnnnnnnnnnnnnnnnnnnnnnnnnnnnnnnnnnnnnnnnnnnnnnnnnnnnnnnnnnnnnnnnnnnnnnnnnnnnnnnnnnnnnnnnnnnnnnnnnnnnnnnnnnnnnnnnnnnnnnnnnnnnnnnnnnnnnnnnnnnnnnnnnnnnnnnnnnnnnnnnnnnnnnnnnnnnnnnnnnnnnnnnnnnnnnnnnnnnnnnnnnnnnnnnnnnnnnnnnnnnnnnnnnnnnnnnnnnnnnnnnnnnnnnnnnnnnnnnnnnnnnnnnnnnnnnnnnnnnnnnnnnnnnnnnnnnnnnnnnnnnnnnnnnnnnnnnnnnnnnnnnnnnnnnnnnnnnnnnnnnnnnnnnnnnnnnnnnnnnnnnnnnnnnnnnnnnnnnnnnnnnnnnnnnnnnnnnnnnnnnnnnnnnnnnnnnnnnnnnnnnnnnnnnnnnnnnnnnnnnnnnnnnnnnnnnnnnnnnnnnnnnnnnnnnnnnnnnnnnnnnnnnnnnnnnnnnnnnnnnnnnnnnnnnnnnnnnnnnnnnnnnnnnnnnnnnnnnnnnnnnnnnnnnnnnnnnnnnnnnnnnnnnnnnnnnnnnnnnnnnnnnnnnnnnnnnnnnnnnnnnnnnnnnnnnnnnnnnnnnnnnnnnnnnnnnnnnnnnnnnnnnnnnnnnnnnnnnnnnnnnnnnnnnnnnnnnnnnnnnnnnnnnnnnnnnnnnnnnnnnnnnnnnnnnnnnnnnnnnnnnnnnnnnnnnnnnnnnnnnnnnnnnnnnnnnnnnnnnnnnnnnnnnnnnnnnnnnnnnnnnnnnnnnnnnnnnnnnnnnnnnnnnnnnnnnnnnnnnnnnnnnnnnnnnnnnnnnnnnnnnnnnnnnnnnnnnnnnnnnnnnnnnnnnnnnnnnnnnnnnnnnnnnnnnnnnnnnnnnnnnnnnnnnnnnnnnnnnnnnnnnnnnnnnnnnnnnnnnnnnnnnnnnnnnnnnnnnnnnnnnnnnnnnnnnnnnnnnnnnnnnnnnnnnnnnnnnnnnnnnnnnnnnnnnnnnnnnnnnnnnnnnnnnnnnnnnnnnnnnnnnnnnnnnnnnnnnnnnnnnnnnnnnnnnnnnnnnnnnnnnnnnnnnnnnnnnnnnnnnnnnnnnnnnnnnnnnnnnnnnnnnnnnnnnnnnnnnnnnnnnnnnnnnnnnnnnnnnnnnnnnnnnnnnnnnnnnnnnnnnnnnnnnnnnnnnnnnnnnnnnnnnnnnnnnnnnnnnnnnnnnnnnnnnnnnnnnnnnnnnnnnnnnnnnnnnnnnnnnnnnnnnnnnnnnnnnnnnnnnnnnnnnnnnnnnnnnnnnnnnnnnnnnnnnnnnnnnnnnnnnnnnnnnnnnnnnnnnnnnnnnnnnnnnnnnnnnnnnnnnnnnnnnnnnnnnnnnnnnnnnnnnnnnnnnnnnnnnnnnnnnnnnnnnnnnnnnnnnnnnnnnnnnnnnnnnnnnnnnnnnnnnnnnnnnnnnnnnnnnnnnnnnnnnnnnnnnnnnnnnnnnnnnnnnnnnnnnnnnnnnnnnnnnnnnnnnnnnnnnnnnnnnnnnnnnnnnnnnnnnnnnnnnnnnnnnnnnnnnnnnnnnnnnnnnnnnnnnnnnnnnnnnnnnnnnnnnnnnnnnnnnnnnnnnnnnnnnnnnnnnnnnnnnnnnnnnnnnnnnnnnnnnnnnnnnnnnnnnnnnnnnnnnnnnnnnnnnnnnnnnnnnnnnnnnnnnnnnnnnnnnnnnnnnnnnnnnnnnnnnnnnnnnnnnnnnnnnnnnnnnnnnnnnnnnnnnnnnnnnnnnnnnnnnnnnnnnnnnnnnnnnnnnnnnnnnnnnnnnnnnnnnnnnnnnnnnnnnnnnnnnnnnnnnnnnnnnnnnnnnnnnnnnnnnnnnnnnnnnnnnnnnnnnnnnnnnnnnnnnnnnnnnnnnnnnnnnnnnnnnnnnnnnnnnnnnnnnnnnnnnnnnnnnnnnnnnnnnnnnnnnnnnnnnnnnnnnnnnnnnnnnnnnnnnnnnnnnnnnnnnnnnnnnnnnnnnnnnnnnnnnnnnnnnnnnnnnnnnnnnnnnnnnnnnnnnnnnnnnnnnnnnnnnnnnnnnnnnnnnnnnnnnnnnnnnnnnnnnnnnnnnnnnnnnnnnnnnnnnnnnnnnnnnnnnnnnnnnnnnnnnnnnnnnnnnnnnnnnnnnnnnnnnnnnnnnnnnnnnnnnnnnnnnnnnnnnnnnnnnnnnnnnnnnnnnnnnnnnnnnnnnnnnnnnnnnnnnnnnnnnnnnnnnnnnnnnnnnnnnnnnnnnnnnnnnnnnnnnnnnnnnnnnnnnnnnnnnnnnnnnnnnnnnnnnnnnnnnnnnnnnnnnnnnnnnnnnnnnnnnnnnnnnnnnnnnnnnnnnnnnnnnnnnnnnnnnnnnnnnnnnnnnnnnnnnnnnnnnnnnnnnnnnnnnnnnnnnnnnnnnnnnnnnnnnnnnnnnnnnnnnnnnnnnnnnnnnnnnnnnnnnnnnnnnnnnnnnnnnnnnnnnnnnnnnnnnnnnnnnnnnnnnnnnnnnnnnnnnnnnnnnnnnnnnnnnnnnnnnnnnnnnnnnnnnnnnnnnnnnnnnnnnnnnnnnnnnnnnnnnnnnnnnnnnnnnnnnnnnnnnnnnnnnnnnnnnnnnnnnnnnnnnnnnnnnnnnnnnnnnnnnnnnnnnnnnnnnnnnnnnnnnnnnnnnnnnnnnnnnnnnnnnnnnnnnnnnnnnnnnnnnnnnnnnnnnnnnnnnnnnnnnnnnnnnnnnnnnnnnnnnnnnnnnnnnnnnnnnnnnnnnnnnnnnnnnnnnnnnnnnnnnnnnnnnnnnnnnnnnnnnnnnnnnnnnnnnnnnnnnnnnnnnnnnnnnnnnnnnnnnnnnnnnnnnnnnnnnnnnnnnnnnnnnnnnnnnnnnnnnnnnnnnnnnnnnnnnnnnnnnnnnnnnnnnnnnnnnnnnnnnnnnnnnnnnnnnnnnnnnnnnnnnnnnnnnnnnnnnnnnnnnnnnnnnnnnnnnnnnnnnnnnnnnnnnnnnnnnnnnnnnnnnnnnnnnnnnnnnnnnnnnnnnnnnnnnnnnnnnnnnnnnnnnnnnnnnnnnnnnnnnnnnnnnnnnnnnnnnnnnnnnnnnnnnnnnnnnnnnnnnnnnnnnnnnnnnnnnnnnnnnnnnnnnnnnnnnnnnnnnnnnnnnnnnnnnnnnnnnnnnnnnnnnnnnnnnnnnnnnnnnnnnnnnnnnnnnnnnnnnnnnnnnnnnnnnnnnnnnnnnnnnnnnnnnnnnnnnnnnnnnnnnnnnnnnnnnnnnnnnnnnnnnnnnnnnnnnnnnnnnnnnnnnnnnnnnnnnnnnnnnnnnnnnnnnnnnnnnnnnnnnnnnnnnnnnnnnnnnnnnnnnnnnnnnnnnnnnnnnnnnnnnnnnnnnnnnnnnnnnnnnnnnnnnnnnnnnnnnnnnnnnnnnnnnnnnnnnnnnnnnnnnnnnnnnnnnnnnnnnnnnnnnnnnnnnnnnnnnnnnnnnnnnnnnnnnnnnnnnnnnnnnnnnnnnnnnnnnnnnnnnnnnnnnnnnnnnnnnnnnnnnnnnnnnnnnnnnnnnnnnnnnnnnnnnnnnnnnnnnnnnnnnnnnnnnnnnnnnnnnnnnnnnnnnnnnnnnnnnnnnnnnnnnnnnnnnnnnnnnnnnnnnnnnnnnnnnnnnnnnnnnnnnnnnnnnnnnnnnnnnnnnnnnnnnnnnnnnnnnnnnnnnnnnnnnnnnnnnnnnnnnnnnnnnnnnnnnnnnnnnnnnnnnnnnnnnnnnnnnnnnnnnnnnnnnnnnnnnnnnnnnnnnnnnnnnnnnnnnnnnnnnnnnnnnnnnnnnnnnnnnnnnnnnnnnnnnnnnnnnnnnnnnnnnnnnnnnnnnnnnnnnnnnnnnnnnnnnnnnnnnnnnnnnnnnnnnnnnnnnnnnnnnnnnnnnnnnnnnnnnnnnnnnnnnnnnnnnnnnnnnnnnnnnnnnnnnnnnnnnnnnnnnnnnnnnnnnnnnnnnnnnnnnnnnnnnnnnnnnnnnnnnnnnnnnnnnnnnnnnnnnnnnnnnnnnnnnnnnnnnnnnnnnnnnnnnnnnnnnnnnnnnnnnnnnnnnnnnnnnnnnnnnnnnnnnnnnnnnnnnnnnnnnnnnnnnnnnnnnnnnnnnnnnnnnnnnnnnnnnnnnnnnnnnnnnnnnnnnnnnnnnnnnnnnnnnnnnnnnnnnnnnnnnnnnnnnnnnnnnnnnnnnnnnnnnnnnnnnnnnnnnnnnnnnnnnnnnnnnnnnnnnnnnnnnnnnnnnnnnnnnnnnnnnnnnnnnnnnnnnnnnnnnnnnnnnnnnnnnnnnnnnnnnnnnnnnnnnnnnnnnnnnnnnnnnnnnnnnnnnnnnnnnnnnnnnnnnnnnnnnnnnnnnnnnnnnnnnnnnnnnnnnnnnnnnnnnnnnnnnnnnnnnnnnnnnnnnnnnnnnnnnnnnnnnnnnnnnnnnnnnnnnnnnnnnnnnnnnnnnnnnnnnnnnnnnnnnnnnnnnnnnnnnnnnnnnnnnnnnnnnnnnnnnnnnnnnnnnnnnnnnnnnnnnnnnnnnnnnnnnnnnnnnnnnnnnnnnnnnnnnnnnnnnnnnnnnnnnnnnnnnnnnnnnnnnnnnnnnnnnnnnnnnnnnnnnnnnnnnnnnnnnnnnnnnnnnnnnnnnnnnnnnnnnnnnnnnnnnnnnnnnnnnnnnnnnnnnnnnnnnnnnnnnnnnnnnnnnnnnnnnnnnnnnnnnnnnnnnnnnnnnnnnnnnnnnnnnnnnnnnnnnnnnnnnnnnnnnnnnnnnnnnnnnnnnnnnnnnnnnnnnnnnnnnnnnnnnnnnnnnnnnnnnnnnnnnnnnnnnnnnnnnnnnnnnnnnnnnnnnnnnnnnnnnnnnnnnnnnnnnnnnnnnnnnnnnnnnnnnnnnnnnnnnnnnnnnnnnnnnnnnnnnnnnnnnnnnnnnnnnnnnnnnnnnnnnnnnnnnnnnnnnnnnnnnnnnnnnnnnnnnnnnnnnnnnnnnnnnnnnnnnnnnnnnnnnnnnnnnnnnnnnnnnnnnnnnnnnnnnnnnnnnnnnnnnnnnnnnnnnnnnnnnnnnnnnnnnnnnnnnnnnnnnnnnnnnnnnnnnnnnnnnnnnnnnnnnnnnnnnnnnnnnnnnnnnnnnnnnnnnnnnnnnnnnnnnnnnnnnnnnnnnnnnnnnnnnnnnnnnnnnnnnnnnnnnnnnnnnnnnnnnnnnnnnnnnnnnnnnnnnnnnnnnnnnnnnnnnnnnnnnnnnnnnnnnnnnnnnnnnnnnnnnnnnnnnnnnnnnnnnnnnnnnnnnnnnnnnnnnnnnnnnnnnnnnnnnnnnnnnnnnnnnnnnnnnnnnnnnnnnnnnnnnnnnnnnnnnnnnnnnnnnnnnnnnnnnnnnnnnnnnnnnnnnnnnnnnnnnnnnnnnnnnnnnnnnnnnnnnnnnnnnnnnnnnnnnnnnnnnnnnnnnnnnnnnnnnnnnnnnnnnnnnnnnnnnnnnnnnnnnnnnnnnnnnnnnnnnnnnnnnnnnnnnnnnnnnnnnnnnnnnnnnnnnnnnnnnnnnnnnnnnnnnnnnnnnnnnnnnnnnnnnnnnnnnnnnnnnnnnnnnnnnnnnnnnnnnnnnnnnnnnnnnnnnnnnnnnnnnnnnnnnnnnnnnnnnnnnnnnnnnnnnnnnnnnnnnnnnnnnnnnnnnnnnnnnnnnnnnnnnnnnnnnnnnnnnnnnnnnnnnnnnnnnnnnnnnnnnnnnnnnnnnnnnnnnnnnnnnnnnnnnnnnnnnnnnnnnnnnnnnnnnnnnnnnnnnnnnnnnnnnnnnnnnnnnnnnnnnnnnnnnnnnnnnnnnnnnnnnnnnnnnnnnnnnnnnnnnnnnnnnnnnnnnnnnnnnnnnnnnnnnnnnnnnnnnnnnnnnnnnnnnnnnnnnnnnnnnnnnnnnnnnnnnnnnnnnnnnnnnnnnnnnnnnnnnnnnnnnnnnnnnnnnnnnnnnnnnnnnnnnnnnnnnnnnnnnnnnnnnnnnnnnnnnnnnnnnnnnnnnnnnnnnnnnnnnnnnnnnnnnnnnnnnnnnnnnnnnnnnnnnnnnnnnnnnnnnnnnnnnnnnnnnnnnnnnnnnnnnnnnnnnnnnnnnnnnnnnnnnnnnnnnnnnnnnnnnnnnnnnnnnnnnnnnnnnnnnnnnnnnnnnnnnnnnnnnnnnnnnnnnnnnnnnnnnnnnnnnnnnnnnnnnnnnnnnnnnnnnnnnnnnnnnnnnnnnnnnnnnnnnnnnnnnnnnnnnnnnnnnnnnnnnnnnnnnnnnnnnnnnnnnnnnnnnnnnnnnnnnnnnnnnnnnnnnnnnnnnnnnnnnnnnnnnnnnnnnnnnnnnnnnnnnnnnnnnnnnnnnnnnnnnnnnnnnnnnnnnnnnnnnnnnnnnnnnnnnnnnnnnnnnnnnnnnnnnnnnnnnnnnnnnnnnnnnnnnnnnnnnnnnnnnnnnnnnnnnnnnnnnnnnnnnnnnnnnnnnnnnnnnnnnnnnnnnnnnnnnnnnnnnnnnnnnnnnnnnnnnnnnnnnnnnnnnnnnnnnnnnnnnnnnnnnnnnnnnnnnnnnnnnnnnnnnnnnnnnnnnnnnnnnnnnnnnnnnnnnnnnnnnnnnnnnnnnnnnnnnnnnnnnnnnnnnnnnnnnnnnnnnnnnnnnnnnnnnnnnnnnnnnnnnnnnnnnnnnnnnnnnnnnnnnnnnnnnnnnnnnnnnnnnnnnnnnnnnnnnnnnnnnnnnnnnnnnnnnnnnnnnnnnnnnnnnnnnnnnnnnnnnnnnnnnnnnnnnnnnnnnnnnnnnnnnnnnnnnnnnnnnnnnnnnnnnnnnnnnnnnnnnnnnnnnnnnnnnnnnnnnnnnnnnnnnnnnnnnnnnnnnnnnnnnnnnnnnnnnnnnnnnnnnnnnnnnnnnnnnnnnnnnnnnnnnnnnnnnnnnnnnnnnnnnnnnnnnnnnnnnnnnnnnnnnnnnnnnnnnnnnnnnnnnnnnnnnnnnnnnnnnnnnnnnnnnnnnnnnnnnnnnnnnnnnnnnnnnnnnnnnnnnnnnnnnnnnnnnnnnnnnnnnnnnnnnnnnnnnnnnnnnnnnnnnnnnnnnnnnnnnnnnnnnnnnnnnnnnnnnnnnnnnnnnnnnnnnnnnnnnnnnnnnnnnnnnnnnnnnnnnnnnnnnnnnnnnnnnnnnnnnnnnnnnnnnnnnnnnnnnnnnnnnnnnnnnnnnnnnnnnnnnnnnnnnnnnnnnnnnnnnnnnnnnnnnnnnnnnnnnnnnnnnnnnnnnnnnnnnnnnnnnnnnnnnnnnnnnnnnnnnnnnnnnnnnnnnnnnnnnnnnnnnnnnnnnnnnnnnnnnnnnnnnnnnnnnnnnnnnnnnnnnnnnnnnnnnnnnnnnnnnnnnnnnnnnnnnnnnnnnnnnnnnnnnnnnnnnnnnnnnnnnnnnnnnnnnnnnnnnnnnnnnnnnnnnnnnnnnnnnnnnnnnnnnnnnnnnnnnnnnnnnnnnnnnnnnnnnnnnnnnnnnnnnnnnnnnnnnnnnnnnnnnnnnnnnnnnnnnnnnnnnnnnnnnnnnnnnnnnnnnnnnnnnnnnnnnnnnnnnnnnnnnnnnnnnnnnnnnnnnnnnnnnnnnnnnnnnnnnnnnnnnnnnnnnnnnnnnnnnnnnnnnnnnnnnnnnnnnnnnnnnnnnnnnnnnnnnnnnnnnnnnnnnnnnnnnnnnnnnnnnnnnnnnnnnnnnnnnnnnnnnnnnnnnnnnnnnnnnnnnnnnnnnnnnnnnnnnnnnnnnnnnnnnnnnnnnnnnnnnnnnnnnnnnnnnnnnnnnnnnnnnnnnnnnnnnnnnnnnnnnnnnnnnnnnnnnnnnnnnnnnnnnnnnnnnnnnnnnnnnnnnnnnnnnnnnnnnnnnnnnnnnnnnnnnnnnnnnnnnnnnnnnnnnnnnnnnnnnnnnnnnnnnnnnnnnnnnnnnnnnnnnnnnnnnnnnnnnnnnnnnnnnnnnnnnnnnnnnnnnnnnnnnnnnnnnnnnnnnnnnnnnnnnnnnnnnnnnnnnnnnnnnnnnnnnnnnnnnnnnnnnnnnnnnnnnnnnnnnnnnnnnnnnnnnnnnnnnnnnnnnnnnnnnnnnnnnnnnnnnnnnnnnnnnnnnnnnnnnnnnnnnnnnnnnnnnnnnnnnnnnnnnnnnnnnnnnnnnnnnnnnnnnnnnnnnnnnnnnnnnnnnnnnnnnnnnnnnnnnnnnnnnnnnnnnnnnnnnnnnnnnnnnnnnnnnnnnnnnnnnnnnnnnnnnnnnnnnnnnnnnnnnnnnnnnnnnnnnnnnnnnnnnnnnnnnnnnnnnnnnnnnnnnnnnnnnnnnnnnnnnnnnnnnnnnnnnnnnnnnnnnnnnnnnnnnnnnnnnnnnnnnnnnnnnnnnnnnnnnnnnnnnnnnnnnnnnnnnnnnnnnnnnnnnnnnnnnnnnnnnnnnnnnnnnnnnnnnnnnnnnnnnnnnnnnnnnnnnnnnnnnnnnnnnnnnnnnnnnnnnnnnnnnnnnnnnnnnnnnnnnnnnnnnnnnnnnnnnnnnnnnnnnnnnnnnnnnnnnnnnnnnnnnnnnnnnnnnnnnnnnnnnnnnnnnnnnnnnnnnnnnnnnnnnnnnnnnnnnnnnnnnnnnnnnnnnnnnnnnnnnnnnnnnnnnnnnnnnnnnnnnnnnnnnnnnnnnnnnnnnnnnnnnnnnnnnnnnnnnnnnnnnnnnnnnnnnnnnnnnnnnnnnnnnnnnnnnnnnnnnnnnnnnnnnnnnnnnnnnnnnnnnnnnnnnnnnnnnnnnnnnnnnnnnnnnnnnnnnnnnnnnnnnnnnnnnnnnnnnnnnnnnnnnnnnnnnnnnnnnnnnnnnnnnnnnnnnnnnnnnnnnnnnnnnnnnnnnnnnnnnnnnnnnnnnnnnnnnnnnnnnnnnnnnnnnnnnnnnnnnnnnnnnnnnnnnnnnnnnnnnnnnnnnnnnnnnnnnnnnnnnnnnnnnnnnnnnnnnnnnnnnnnnnnnnnnnnnnnnnnnnnnnnnnnnnnnnnnnnnnnnnnnnnnnnnnnnnnnnnnnnnnnnnnnnnnnnnnnnnnnnnnnnnnnnnnnnnnnnnnnnnnnnnnnnnnnnnnnnnnnnnnnnnnnnnnnnnnnnnnnnnnnnnnnnnnnnnnnnnnnnnnnnnnnnnnnnnnnnnnnnnnnnnnnnnnnnnnnnnnnnnnnnnnnnnnnnnnnnnnnnnnnnnnnnnnnnnnnnnnnnnnnnnnnnnnnnnnnnnnnnnnnnnnnnnnnnnnnnnnnnnnnnnnnnnnnnnnnnnnnnnnnnnnnnnnnnnnnnnnnnnnnnnnnnnnnnnnnnnnnnnnnnnnnnnnnnnnnnnnnnnnnnnnnnnnnnnnnnnnnnnnnnnnnnnnnnnnnnnnnnnnnnnnnnnnnnnnnnnnnnnnnnnnnnnnnnnnnnnnnnnnnnnnnnnnnnnnnnnnnnnnnnnnnnnnnnnnnnnnnnnnnnnnnnnnnnnnnnnnnnnnnnnnnnnnnnnnnnnnnnnnnnnnnnnnnnnnnnnnnnnnnnnnnnnnnnnnnnnnnnnnnnnnnnnnnnnnnnnnnnnnnnnnnnnnnnnnnnnnnnnnnnnnnnnnnnnnnnnnnnnnnnnnnnnnnnnnnnnnnnnnnnnnnnnnnnnnnnnnnnnnnnnnnnnnnnnnnnnnnnnnnnnnnnnnnnnnnnnnnnnnnnnnnnnnnnnnnnnnnnnnnnnnnnnnnnnnnnnnnnnnnnnnnnnnnnnnnnnnnnnnnnnnnnnnnnnnnnnnnnnnnnnnnnnnnnnnnnnnnnnnnnnnnnnnnnnnnnnnnnnnnnnnnnnnnnnnnnnnnnnnnnnnnnnnnnnnnnnnnnnnnnnnnnnnnnnnnnnnnnnnnnnnnnnnnnnnnnnnnnnnnnnnnnnnnnnnnnnnnnnnnnnnnnnnnnnnnnnnnnnnnnnnnnnnnnnnnnnnnnnnnnnnnnnnnnnnnnnnnnnnnnnnnnnnnnnnnnnnnnnnnnnnnnnnnnnnnnnnnnnnnnnnnnnnnnnnnnnnnnnnnnnnnnnnnnnnnnnnnnnnnnnnnnnnnnnnnnnnnnnnnnnnnnnnnnnnnnnnnnnnnnnnnnnnnnnnnnnnnnnnnnnnnnnnnnnnnnnnnnnnnnnnnnnnnnnnnnnnnnnnnnnnnnnnnnnnnnnnnnnnnnnnnnnnnnnnnnnnnnnnnnnnnnnnnnnnnnnnnnnnnnnnnnnnnnnnnnnnnnnnnnnnnnnnnnnnnnnnnnnnnnnnnnnnnnnnnnnnnnnnnnnnnnnnnnnnnnnnnnnnnnnnnnnnnnnnnnnnnnnnnnnnnnnnnnnnnnnnnnnnnnnnnnnnnnnnnnnnnnnnnnnnnnnnnnnnnnnnnnnnnnnnnnnnnnnnnnnnnnnnnnnnnnnnnnnnnnnnnnnnnnnnnnnnnnnnnnnnnnnnnnnnnnnnnnnnnnnnnnnnnnnnnnnnnnnnnnnnnnnnnnnnnnnnnnnnnnnnnnnnnnnnnnnnnnnnnnnnnnnnnnnnnnnnnnnnnnnnnnnnnnnnnnnnnnnnnnnnnnnnnnnnnnnnnnnnnnnnnnnnnnnnnnnnnnnnnnnnnnnnnnnnnnnnnnnnnnnnnnnnnnnnnnnnnnnnnnnnnnnnnnnnnnnnnnnnnnnnnnnnnnnnnnnnnnnnnnnnnnnnnnnnnnnnnnnnnnnnnnnnnnnnnnnnnnnnnnnnnnnnnnnnnnnnnnnnnnnnnnnnnnnnnnnnnnnnnnnnnnnnnnnnnnnnnnnnnnnnnnnnnnnnnnnnnnnnnnnnnnnnnnnnnnnnnnnnnnnnnnnnnnnnnnnnnnnnnnnnnnnnnnnnnnnnnnnnnnnnnnnnnnnnnnnnnnnnnnnnnnnnnnnnnnnnnnnnnnnnnnnnnnnnnnnnnnnnnnnnnnnnnnnnnnnnnnnnnnnnnnnnnnnnnnnnnnnnnnnnnnnnnnnnnnnnnnnnnnnnnnnnnnnnnnnnnnnnnnnnnnnnnnnnnnnnnnnnnnnnnnnnnnnnnnnnnnnnnnnnnnnnnnnnnnnnnnnnnnnnnnnnnnnnnnnnnnnnnnnnnnnnnnnnnnnnnnnnnnnnnnnnnnnnnnnnnnnnnnnnnnnnnnnnnnnnnnnnnnnnnnnnnnnnnnnnnnnnnnnnnnnnnnnnnnnnnnnnnnnnnnnnnnnnnnnnnnnnnnnnnnnnnnnnnnnnnnnnnnnnnnnnnnnnnnnnnnnnnnnnnnnnnnnnnnnnnnnnnnnnnnnnnnnnnnnnnnnnnnnnnnnnnnnnnnnnnnnnnnnnnnnnnnnnnnnnnnnnnnnnnnnnnnnnnnnnnnnnnnnnnnnnnnnnnnnnnnnnnnnnnnnnnnnnnnnnnnnnnnnnnnnnnnnnnnnnnnnnnnnnnnnnnnnnnnnnnnnnnnnnnnnnnnnnnnnnnnnnnnnnnnnnnnnnnnnnnnnnnnnnnnnnnnnnnnnnnnnnnnnnnnnnnnnnnnnnnnnnnnnnnnnnnnnnnnnnnnnnnnnnnnnnnnnnnnnnnnnnnnnnnnnnnnnnnnnnnnnnnnnnnnnnnnnnnnnnnnnnnnnnnnnnnnnnnnnnnnnnnnnnnnnnnnnnnnnnnnnnnnnnnnnnnnnnnnnnnnnnnnnnnnnnnnnnnnnnnnnnnnnnnnnnnnnnnnnnnnnnnnnnnnnnnnnnnnnnnnnnnnnnnnnnnnnnnnnnnnnnnnnnnnnnnnnnnnnnnnnnnnnnnnnnnnnnnnnnnnnnnnnnnnnnnnnnnnnnnnnnnnnnnnnnnnnnnnnnnnnnnnnnnnnnnnnnnnnnnnnnnnnnnnnnnnnnnnnnnnnnnnnnnnnnnnnnnnnnnnnnnnnnnnnnnnnnnnnnnnnnnnnnnnnnnnnnnnnnnnnnnnnnnnnnnnnnnnnnnnnnnnnnnnnnnnnnnnnnnnnnnnnnnnnnnnnnnnnnnnnnnnnnnnnnnnnnnnnnnnnnnnnnnnnnnnnnnnnnnnnnnnnnnnnnnnnnnnnnnnnnnnnnnnnnnnnnnnnnnnnnnnnnnnnnnnnnnnnnnnnnnnnnnnnnnnnnnnnnnnnnnnnnnnnnnnnnnnnnnnnnnnnnnnnnnnnnnnnnnnnnnnnnnnnnnnnnnnnnnnnnnnnnnnnnnnnnnnnnnnnnnnnnnnnnnnnnnnnnnnnnnnnnnnnnnnnnnnnnnnnnnnnnnnnnnnnnnnnnnnnnnnnnnnnnnnnnnnnnnnnnnnnnnnnnnnnnnnnnnnnnnnnnnnnnnnnnnnnnnnnnnnnnnnnnnnnnnnnnnnnnnnnnnnnnnnnnnnnnnnnnnnnnnnnnnnnnnnnnnnnnnnnnnnnnnnnnnnnnnnnnnnnnnnnnnnnnnnnnnnnnnnnnnnnnnnnnnnnnnnnnnnnnnnnnnnnnnnnnnnnnnnnnnnnnnnnnnnnnnnnnnnnnnnnnnnnnnnnnnnnnnnnnnnnnnnnnnnnnnnnnnnnnnnnnnnnnnnnnnnnnnnnnnnnnnnnnnnnnnnnnnnnnnnnnnnnnnnnnnnnnnnnnnnnnnnnnnnnnnnnnnnnnnnnnnnnnnnnnnnnnnnnnnnnnnnnnnnnnnnnnnnnnnnnnnnnnnnnnnnnnnnnnnnnnnnnnnnnnnnnnnnnnnnnnnnnnnnnnnnnnnnnnnnnnnnnnnnnnnnnnnnnnnnnnnnnnnnnnnnnnnnnnnnnnnnnnnnnnnnnnnnnnnnnnnnnnnnnnnnnnnnnnnnnnnnnnnnnnnnnnnnnnnnnnnnnnnnnnnnnnnnnnnnnnnnnnnnnnnnnnnnnnnnnnnnnnnnnnnnnnnnnnnnnnnnnnnnnnnnnnnnnnnnnnnnnnnnnnnnnnnnnnnnnnnnnnnnnnnnnnnnnnnnnnnnnnnnnnnnnnnnnnnnnnnnnnnnnnnnnnnnnnnnnnnnnnnnnnnnnnnnnnnnnnnnnnnnnnnnnnnnnnnnnnnnnnnnnnnnnnnnnnnnnnnnnnnnnnnnnnnnnnnnnnnnnnnnnnnnnnnnnnnnnnnnnnnnnnnnnnnnnnnnnnnnnnnnnnnnnnnnnnnnnnnnnnnnnnnnnnnnnnnnnnnnnnnnnnnnnnnnnnnnnnnnnnnnnnnnnnnnnnnnnnnnnnnnnnnnnnnnnnnnnnnnnnnnnnnnnnnnnnnnnnnnnnnnnnnnnnnnnnnnnnnnnnnnnnnnnnnnnnnnnnnnnnnnnnnnnnnnnnnnnnnnnnnnnnnnnnnnnnnnnnnnnnnnnnnnnnnnnnnnnnnnnnnnnnnnnnnnnnnnnnnnnnnnnnnnnnnnnnnnnnnnnnnnnnnnnnnnnnnnnnnnnnnnnnnnnnnnnnnnnnnnnnnnnnnnnnnnnnnnnnnnnnnnnnnnnnnnnnnnnnnnnnnnnnnnnnnnnnnnnnnnnnnnnnnnnnnnnnnnnnnnnnnnnnnnnnnnnnnnnnnnnnnnnnnnnnnnnnnnnnnnnnnnnnnnnnnnnnnnnnnnnnnnnnnnnnnnnnnnnnnnnnnnnnnnnnnnnnnnnnnnnnnnnnnnnnnnnnnnnnnnnnnnnnnnnnnnnnnnnnnnnnnnnnnnnnnnnnnnnnnnnnnnnnnnnnnnnnnnnnnnnnnnnnnnnnnnnnnnnnnnnnnnnnnnnnnnnnnnnnnnnnnnnnnnnnnnnnnnnnnnnnnnnnnnnnnnnnnnnnnnnnnnnnnnnnnnnnnnnnnnnnnnnnnnnnnnnnnnnnnnnnnnnnnnnnnnnnnnnnnnnnnnnnnnnnnnnnnnnnnnnnnnnnnnnnnnnnnnnnnnnnnnnnnnnnnnnnnnnnnnnnnnnnnnnnnnnnnnnnnnnnnnnnnnnnnnnnnnnnnnnnnnnnnnnnnnnnnnnnnnnnnnnnnnnnnnnnnnnnnnnnnnnnnnnnnnnnnnnnnnnnnnnnnnnnnnnnnnnnnnnnnnnnnnnnnnnnnnnnnnnnnnnnnnnnnnnnnnnnnnnnnnnnnnnnnnnnnnnnnnnnnnnnnnnnnnnnnnnnnnnnnnnnnnnnnnnnnnnnnnnnnnnnnnnnnnnnnnnnnnnnnnnnnnnnnnnnnnnnnnnnnnnnnnnnnnnnnnnnnnnnnnnnnnnnnnnnnnnnnnnnnnnnnnnnnnnnnnnnnnnnnnnnnnnnnnnnnnnnnnnnnnnnnnnnnnnnnnnnnnnnnnnnnnnnnnnnnnnnnnnnnnnnnnnnnnnnnnnnnnnnnnnnnnnnnnnnnnnnnnnnnnnnnnnnnnnnnnnnnnnnnnnnnnnnnnnnnnnnnnnnnnnnnnnnnnnnnnnnnnnnnnnnnnnnnnnnnnnnnnnnnnnnnnnnnnnnnnnnnnnnnnnnnnnnnnnnnnnnnnnnnnnnnnnnnnnnnnnnnnnnnnnnnnnnnnnnnnnnnnnnnnnnnnnnnnnnnnnnnnnnnnnnnnnnnnnnnnnnnnnnnnnnnnnnnnnnnnnnnnnnnnnnnnnnnnnnnnnnnnnnnnnnnnnnnnnnnnnnnnnnnnnnnnnnnnnnnnnnnnnnnnnnnnnnnnnnnnnnnnnnnnnnnnnnnnnnnnnnnnnnnnnnnnnnnnnnnnnnnnnnnnnnnnnnnnnnnnnnnnnnnnnnnnnnnnnnnnnnnnnnnnnnnnnnnnnnnnnnnnnnnnnnnnnnnnnnnnnnnnnnnnnnnnnnnnnnnnnnnnnnnnnnnnnnnnnnnnnnnnnnnnnnnnnnnnnnnnnnnnnnnnnnnnnnnnnnnnnnnnnnnnnnnnnnnnnnnnnnnnnnnnnnnnnnnnnnnnnnnnnnnnnnnnnnnnnnnnnnnnnnnnnnnnnnnnnnnnnnnnnnnnnnnnnnnnnnnnnnnnnnnnnnnnnnnnnnnnnnnnnnnnnnnnnnnnnnnnnnnnnnnnnnnnnnnnnnnnnnnnnnnnnnnnnnnnnnnnnnnnnnnnnnnnnnnnnnnnnnnnnnnnnnnnnnnnnnnnnnnnnnnnnnnnnnnnnnnnnnnnnnnnnnnnnnnnnnnnnnnnnnnnnnnnnnnnnnnnnnnnnnnnnnnnnnnnnnnnnnnnnnnnnnnnnnnnnnnnnnnnnnnnnnnnnnnnnnnnnnnnnnnnnnnnnnnnnnnnnnnnnnnnnnnnnnnnnnnnnnnnnnnnnnnnnnnnnnnnnnnnnnnnnnnnnnnnnnnnnnnnnnnnnnnnnnnnnnnnnnnnnnnnnnnnnnnnnnnnnnnnnnnnnnnnnnnnnnnnnnnnnnnnnnnnnnnnnnnnnnnnnnnnnnnnnnnnnnnnnnnnnnnnnnnnnnnnnnnnnnnnnnnnnnnnnnnnnnnnnnnnnnnnnnnnnnnnnnnnnnnnnnnnnnnnnnnnnnnnnnnnnnnnnnnnnnnnnnnnnnnnnnnnnnnnnnnnnnnnnnnnnnnnnnnnnnnnnnnnnnnnnnnnnnnnnnnnnnnnnnnnnnnnnnnnnnnnnnnnnnnnnnnnnnnnnnnnnnnnnnnnnnnnnnnnnnnnnnnnnnnnnnnnnnnnnnnnnnnnnnnnnnnnnnnnnnnnnnnnnnnnnnnnnnnnnnnnnnnnnnnnnnnnnnnnnnnnnnnnnnnnnnnnnnnnnnnnnnnnnnnnnnnnnnnnnnnnnnnnnnnnnnnnnnnnnnnnnnnnnnnnnnnnnnnnnnnnnnnnnnnnnnnnnnnnnnnnnnnnnnnnnnnnnnnnnnnnnnnnnnnnnnnnnnnnnnnnnnnnnnnnnnnnnnnnnnnnnnnnnnnnnnnnnnnnnnnnnnnnnnnnnnnnnnnnnnnnnnnnnnnnnnnnnnnnnnnnnnnnnnnnnnnnnnnnnnnnnnnnnnnnnnnnnnnnnnnnnnnnnnnnnnnnnnnnnnnnnnnnnnnnnnnnnnnnnnnnnnnnnnnnnnnnnnnnnnnnnnnnnnnnnnnnnnnnnnnnnnnnnnnnnnnnnnnnnnnnnnnnnnnnnnnnnnnnnnnnnnnnnnnnnnnnnnnnnnnnnnnnnnnnnnnnnnnnnnnnnnnnnnnnnnnnnnnnnnnnnnnnnnnnnnnnnnnnnnnnnnnnnnnnnnnnnnnnnnnnnnnnnnnnnnnnnnnnnnnnnnnnnnnnnnnnnnnnnnnnnnnnnnnnnnnnnnnnnnnnnnnnnnnnnnnnnnnnnnnnnnnnnnnnnnnnnnnnnnnnnnnnnnnnnnnnnnnnnnnnnnnnnnnnnnnnnnnnnnnnnnnnnnnnnnnnnnnnnnnnnnnnnnnnnnnnnnnnnnnnnnnnnnnnnnnnnnnnnnnnnnnnnnnnnnnnnnnnnnnnnnnnnnnnnnnnnnnnnnnnnnnnnnnnnnnnnnnnnnnnnnnnnnnnnnnnnnnnnnnnnnnnnnnnnnnnnnnnnnnnnnnnnnnnnnnnnnnnnnnnnnnnnnnnnnnnnnnnnnnnnnnnnnnnnnnnnnnnnnnnnnnnnnnnnnnnnnnnnnnnnnnnnnnnnnnnnnnnnnnnnnnnnnnnnnnnnnnnnnnnnnnnnnnnnnnnnnnnnnnnnnnnnnnnnnnnnnnnnnnnnnnnnnnnnnnnnnnnnnnnnnnnnnnnnnnnnnnnnnnnnnnnnnnnnnnnnnnnnnnnnnnnnnnnnnnnnnnnnnnnnnnnnnnnnnnnnnnnnnnnnnnnnnnnnnnnnnnnnnnnnnnnnnnnnnnnnnnnnnnnnnnnnnnnnnnnnnnnnnnnnnnnnnnnnnnnnnnnnnnnnnnnnnnnnnnnnnnnnnnnnnnnnnnnnnnnnnnnnnnnnnnnnnnnnnnnnnnnnnnnnnnnnnnnnnnnnnnnnnnnnnnnnnnnnnnnnnnnnnnnnnnnnnnnnnnnnnnnnnnnnnnnnnnnnnnnnnnnnnnnnnnnnnnnnnnnnnnnnnnnnnnnnnnnnnnnnnnnnnnnnnnnnnnnnnnnnnnnnnnnnnnnnnnnnnnnnnnnnnnnnnnnnnnnnnnnnnnnnnnnnnnnnnnnnnnnnnnnnnnnnnnnnnnnnnnnnnnnnnnnnnnnnnnnnnnnnnnnnnnnnnnnnnnnnnnnnnnnnnnnnnnnnnnnnnnnnnnnnnnnnnnnnnnnnnnnnnnnnnnnnnnnnnnnnnnnnnnnnnnnnnnnnnnnnnnnnnnnnnnnnnnnnnnnnnnnnnnnnnnnnnnnnnnnnnnnnnnnnnnnnnnnnnnnnnnnnnnnnnnnnnnnnnnnnnnnnnnnnnnnnnnnnnnnnnnnnnnnnnnnnnnnnnnnnnnnnnnnnnnnnnnnnnnnnnnnnnnnnnnnnnnnnnnnnnnnnnnnnnnnnnnnnnnnnnnnnnnnnnnnnnnnnnnnnnnnnnnnnnnnnnnnnnnnnnnnnnnnnnnnnnnnnnnnnnnnnnnnnnnnnnnnnnnnnnnnnnnnnnnnnnnnnnnnnnnnnnnnnnnnnnnnnnnnnnnnnnnnnnnnnnnnnnnnnnnnnnnnnnnnnnnnnnnnnnnnnnnnnnnnnnnnnnnnnnnnnnnnnnnnnnnnnnnnnnnnnnnnnnnnnnnnnnnnnnnnnnnnnnnnnnnnnnnnnnnnnnnnnnnnnnnnnnnnnnnnnnnnnnnnnnnnnnnnnnnnnnnnnnnnnnnnnnnnnnnnnnnnnnnnnnnnnnnnnnnnnnnnnnnnnnnnnnnnnnnnnnnnnnnnnnnnnnnnnnnnnnnnnnnnnnnnnnnnnnnnnnnnnnnnnnnnnnnnnnnnnnnnnnnnnnnnnnnnnnnnnnnnnnnnnnnnnnnnnnnnnnnnnnnnnnnnnnnnnnnnnnnnnnnnnnnnnnnnnnnnnnnnnnnnnnnnnnnnnnnnnnnnnnnnnnnnnnnnnnnnnnnnnnnnnnnnnnnnnnnnnnnnnnnnnnnnnnnnnnnnnnnnnnnnnnnnnnnnnnnnnnnnnnnnnnnnnnnnnnnnnnnnnnnnnnnnnnnnnnnnnnnnnnnnnnnnnnnnnnnnnnnnnnnnnnnnnnnnnnnnnnnnnnnnnnnnnnnnnnnnnnnnnnnnnnnnnnnnnnnnnnnnnnnnnnnnnnnnnnnnnnnnnnnnnnnnnnnnnnnnnnnnnnnnnnnnnnnnnnnnnnnnnnnnnnnnnnnnnnnnnnnnnnnnnnnnnnnnnnnnnnnnnnnnnnnnnnnnnnnnnnnnnnnnnnnnnnnnnnnnnnnnnnnnnnnnnnnnnnnnnnnnnnnnnnnnnnnnnnnnnnnnnnnnnnnnnnnnnnnnnnnnnnnnnnnnnnnnnnnnnnnnnnnnnnnnnnnnnnnnnnnnnnnnnnnnnnnnnnnnnnnnnnnnnnnnnnnnnnnnnnnnnnnnnnnnnnnnnnnnnnnnnnnnnnnnnnnnnnnnnnnnnnnnnnnnnnnnnnnnnnnnnnnnnnnnnnnnnnnnnnnnnnnnnnnnnnnnnnnnnnnnnnnnnnnnnnnnnnnnnnnnnnnnnnnnnnnnnnnnnnnnnnnnnnnnnnnnnnnnnnnnnnnnnnnnnnnnnnnnnnnnnnnnnnnnnnnnnnnnnnnnnnnnnnnnnnnnnnnnnnnnnnnnnnnnnnnnnnnnnnnnnnnnnnnnnnnnnnnnnnnnnnnnnnnnnnnnnnnnnnnnnnnnnnnnnnnnnnnnnnnnnnnnnnnnnnnnnnnnnnnnnnnnnnnnnnnnnnnnnnnnnnnnnnnnnnnnnnnnnnnnnnnnnnnnnnnnnnnnnnnnnnnnnnnnnnnnnnnnnnnnnnnnnnnnnnnnnnnnnnnnnnnnnnnnnnnnnnnnnnnnnnnnnnnnnnnnnnnnnnnnnnnnnnnnnnnnnnnnnnnnnnnnnnnnnnnnnnnnnnnnnnnnnnnnnnnnnnnnnnnnnnnnnnnnnnnnnnnnnnnnnnnnnnnnnnnnnnnnnnnnnnnnnnnnnnnnnnnnnnnnnnnnnnnnnnnnnnnnnnnnnnnnnnnnnnnnnnnnnnnnnnnnnnnnnnnnnnnnnnnnnnnnnnnnnnnnnnnnnnnnnnnnnnnnnnnnnnnnnnnnnnnnnnnnnnnnnnnnnnnnnnnnnnnnnnnnnnnnnnnnnnnnnnnnnnnnnnnnnnnnnnnnnnnnnnnnnnnnnnnnnnnnnnnnnnnnnnnnnnnnnnnnnnnnnnnnnnnnnnnnnnnnnnnnnnnnnnnnnnnnnnnnnnnnnnnnnnnnnnnnnnnnnnnnnnnnnnnnnnnnnnnnnnnnnnnnnnnnnnnnnnnnnnnnnnnnnnnnnnnnnnnnnnnnnnnnnnnnnnnnnnnnnnnnnnnnnnnnnnnnnnnnnnnnnnnnnnnnnnnnnnnnnnnnnnnnnnnnnnnnnnnnnnnnnnnnnnnnnnnnnnnnnnnnnnnnnnnnnnnnnnnnnnnnnnnnnnnnnnnnnnnnnnnnnnnnnnnnnnnnnnnnnnnnnnnnnnnnnnnnnnnnnnnnnnnnnnnnnnnnnnnnnnnnnnnnnnnnnnnnnnnnnnnnnnnnnnnnnnnnnnnnnnnnnnnnnnnnnnnnnnnnnnnnnnnnnnnnnnnnnnnnnnnnnnnnnnnnnnnnnnnnnnnnnnnnnnnnnnnnnnnnnnnnnnnnnnnnnnnnnnnnnnnnaggtatatctatatatatctatattaaagtatataattaccttaattattctttagtttttaataatactatttaatattctagttaagattaggatatataggagattaaaggttattataaaagctttatttactatagtataatataaataccctaaattaactaatatctttaagaattaaattctatttattaataaattaatatagaagggtttattttcttattttaataatttattagccccttttaattcctatctatatctttagataggaattactttttttctaagtctctattaatactctttagattagattaattactttcttccttaaatagttctatctaggtttctattcttataatatatattctttctctttacttataatagtatatagggccttttttaataatagctactattacctagagatattaatataagtttattatatattttagtctttttactaagaaaagagggtaggaatatatactatatctattatatctatagtaatagtatctcctttcctagtatttatattctaattctttttctttaatctattttacttattttctaataaggtcttagtcctcttttctaatttataagaaagtaattataactataaggattagtaactattctatataattatctataaaggactagagatatattactttcctttcttagtaatttaaggtttactttatctctaataatagtaagtctatattagtattaatttaatatagtagtaggattaacttaattagattattaaagagattttagtaagaaaagactatatagataattaggtttagtaatctaattaaaaggaatacttttatatcttctagttaatctattacttttaaattagtaaattcttttttaaaggtaaataggaatatagtaaaagactactttagtccttactatatttttctaagatactaagtagctcttttcttaatatttagatctttataaatatcttctagatattaaaggaattcttttataattttatttacctattagtattatataaatataatagtatttttatttatatttccttctagctataagtaggtataaagtatatatacctagttatctctaagggtatcttagttaattactaatttatttttaattaataatttaaatataggctattctattctaactcctttaaaggttaagggattagagagatataactatagttatatagtttatcttatttctaataacccttaggtaggcttatttttagtcttattattcttattagattcttcttatactattatatttatttagactagctctttaagcttcttaatcctttcctcttatacttatataatctcttcctaggaggtagtagattagactaattactatattattactttagcctatttaggtagttctaattattctatattctcgtttattatactatttatcggtatatccttctatactcttctgatcttctatagaaaaggaagcttttagaatataaagggatagagctagattagaatttaagctaactaagccgtttactattatctaaaagcttaaggaaaggaaataaagcttataggaagaaacgggagaaaataggggtagtaaaggtcatatacttattatataatcctatataggctctggcccattatataggggtagaatatagtcgataactagtatttaactataaagagaaagtagaaggttaactagaattagctaataaaaaggctacccctattacttactaggttcttnnnnnnnnnnnnnnnnnnnnnnnnnnnnnnnnnnnnnnnnnnnnnnnnnnnnnnnnnnnnnnnnnnnnnnnnnnnnnnnnnnnnnnnnnnnnnnnnnnnnnnnnnnnnnnnnnnnnnnnnnnnnnnnnnnnnnnnnnnnnnnnnnnnnnnnnnnnnnnnnnnnnnnnnnnnnnnnnnnnnnnnnnnnnnnnnnnnnnnnnnnnnnnnnnnnnnnnnnnnnnnnnnnnnnnnnnnnnnnnnnnnnnnnnnnnnnnnnnnnnnnnnnnnnnnnnnnnnnnnnnnnnnnnnnnnnnnnnnnnnnnnnnnnnnnnnnnnnnnnnnnnnnnnnnnnnnnnnnnnnnnnnnnnnnnnnnnnnnnnnnnnnnnnnnnnnnnnnnnnnnnnnnnnnnnnnnnnnnnnnnnnnnnnnnatgtatatatagtagaaaaatcctaatcaattctctaactctttaaaaataataatagtctagaaaatataataatctaatagataacttagtaatcaaataaataaaataaaatgaaaggatattttttaggtaaaaaactgtaggactggtttttcgggcagaaaaccatctgagttggtttttctatagaaaaccagcctagtcagtcacgtgacccaactgtatcagggatgaaaaatgacagtattcatcctagattctgacacttcttaattaggatttaatactaaattaggggggtagtagtacataggtaagtataaggaacgtcgaattcttatactaatagcgcaatttttggtttttttttctagaattccaggtagtaatagtaattactaaataagcctccgaatcttaggtttttttaggtatattggtaggtaaaaaattggtatagaaaatagtgactatttaaaatttttgttttataagagttttcacctagctgtagtaacttggcgagaaccgggtagtagcaaaagtacgtatataccgccattacacgctagtgttttttttaaaaaaaagccaaaaattgagtgagcaaaaacatttgcaatggacctggttcgttccattaaagatctaaaatggctgtatattgaaatattaaatacattatcacattactaccccgaggataataagtatcatgacacactcactggccaacatccaggaccgaagactgtagagaaatatccgaatagggatttgaagaggcaagcataatatgcacaaaaaaaggtaaacatacaaattgcttactgagccttcgaagcctttgccttgttttcccttcggcgcttcagcgcatctggggtgtactcggtgtcaaggacataatcccaccaccggaagctgctggaatagttgccgatgaacttctcatggtggagatcgtggtgatcggcaccagcccagaagggaaggaaatggtgaagactccatgggaattcataaccactgtgagcatcaatggcctggaacaagcgcaagacgatccagatgtacatggtcagaatgtgcagttcacctgtcatcgcacaccaaacgatcgggcacccgatagtcccgaagcccaggatcatcacttcaatcggtgaggcatattcagcagccaagccgaaaggcgccgagtactggtggtggattttgtgaatagccttatagaggggtccccaatgaagtgcacggtgggagaagtaatgccaggtatcctccatcacaaagaagattgcaatttgatatgccatagtccaaagggtaggaaatgggatcgaagttgaaagtccacaaaattgtgccaaggggtggaagagcctagcatttgttagatccttagaaatccctggatttggaaagagattcgagtcttaccagatctggggtagttcgacagtgaaatgactcaagagcacgaacttggcgcaatcccattgttcccgtagcgatggaatcttgttctgcatagtattagaggtgaaccagatgaggtttgaaaaaaaaaaaaaaaaagaaattctacttacaccttgaatcttgtagcggttgaacatggcgaatgtgtcgatgaaaatccagggtagtgagcgaccgaagtagaccagttcatgcatgacgaatgacatgattccagtggccaggacatcgttctgcatccaagcataccaggctgcccacaacctctctgccacattcaggttggcattgtatttgccaatctcttcgaactggccccagtatgtccccgaggacaagactgttgaattcctatatgggatgttagatactatgacaggtcgaggatgtgagcatcctacattgcaaaggttgttctctttttcagaaagtaaagagaagcccgaagtcagaaggcagaagtcagaaggcagaaggcaggaggcagaagtcagaggccagcagtcagaaagaataaaggggaaggtagacgtgaaaccaaagccagagcgtgattctatgtaaggttataaagaaaaaaagggataatcaagaagatcaaggacagtccaatcccgacgtggcgagatcaacttttccgccccccctgaacgtaggggtaaggccactggcaagccgatccccatccgagatcaccccacctgcatacaatccggtaatgcggatttcgctgcgttttgtttggttgaaagaacacggtgactccagccaaaaatccagaccccttactaagactgtttctagacatcttacgatcattttgtttgagattttggctttagagtaaatttaaagtaaatagagtagtttgtcactccgcacgataggctcagaaataaaagtgtagtttgcatagtttgtatgtttgcacagtttgcatgcttgcccacatatattcgtgtttatatgtttgcatgtttgcatagtttgcatgcttgcccacatattttcgtgtttatatgtttgtatgtttgtatatgacgacatcccttaatccttcaacttgttcatctccatacccaggtacgatggtcagctttcgagggtagctgcacctcaacgcattgaaagattctgggatgtctgttatacaagagtgagtgtgatataattcctgaaaaccaccttgtactcaaattactttcccacagaaccgtctgtggtgtcaacactcagcttgatcgccttcagcaacagatctcaagcccacagagattggaagccacagatatatccattgaatctcttgagtcaattggccaattgcaagatctcatcaactccatttcagtgacttccaagacccaatcccttctacatcctagtcggttggcagatttactctcgggtactttctctcgcctccaagtacagaccactctccatgaagagaatagtgcccaactctcggaccatgtatggatagcagccgcaaaggctgccgttcaggcatcaggactggtcatgaacagcctcctggatcaaacacttcaactgcacgatgagacctattactggggtgagatgctggggtctatctggtatagcggtctgtatacagtccagacatcaccagggcaattctaccgctggacgaaggatgcatgcgtcgctcaaatgtatcaagaagccccgtccatcactgccagctggtttcgattctaccagattgcccgccaaagtgcctggaaacttggaggacactccattcgcgctcatttgctatccccaattagatcatcccgggcagaaatgcgccagaaacgagatttgctcctgaaaatgaaagacctccatactagcagcctgggccttctaatggaaggatggcatcttttcgaagcaagtgactccgcgactttgaacccggggactatcaacccccaatggcgtactgccgttcacagagcagtggctctgattgaagccatttatcgtcatatagcacttgagcctagcactcacgaattggaacagggagtattcgctaccctggagagggatatcgacgtcactaaaatccacacacaaggggataattccgtgcatgaacctttggacttgatcgagcgacttgtgcatgttcttcgagaggagttaccaaaccataccacttcaatgtcactatttattcatcgtcacgggcgcccttcatgcatagtccgttattggctacctgtatcagccgctcttctttcaggaagtgcatcaatgaggtttttggccaatcgacaagaggaaatcatccagtggattgttgatatcggttccaccactgtcgatttctggggcaattgggttgtgcatcccgtccgaaaactcattgggacgatcagacatgacgaaaaaagcgagattgcaataatgagcaagaatagcctgctggctgatcgagcgagtctagagagaatggtagtggactttgtccgcgatcgcccggatctttaccagggtgtggtggcggataccaccaccatcattaattctgtcaaggagggtgatttgactcccgttctcaaagcatatgaaagggacctgcggtcgccattcgttggaaccgttagaggcgacctcgtccgtgcccttttgatccagatccagaagaccaaggtcgatgtggaaattgccatcagtggtattgatgctttgctgaagagtcaggagcttgtatttgggtatgtcagatcccctcccccctatgcttttttcaatcgttaatatcttttagatttgtggggttgactcctgggattttggtttcctttgcaactatgaggtggctgggtggtcttctcggcagccgacgaggtttgcgaaagggcaagcagcgacatgagctaagacgtggattgcggtatgatgctatcaaacttgtgtataatctcacaaggctaattctagtactttatatgcaggaatgtggctcgcattttgacttcttctgcggttctatcaaacgggactgtcgcttacaaggacgccgggcaattgatatgtgaggcagaggctctccttcagcatgttaagatgatttctggaagcatgcagtacgaagagttccgagaagacatccaggatctcttgaatgttcagaatggagtggacaagcaacttcgcgtaatcgaaaggatgagatgggcatatttccagtaggttggctacatgtattttgctatactacgtatcaacatacaactaagtatcagatatgtagttatgcaaataattcatgttttctatacagttgctgtcttaagagttgggagcccagaaatgtacaaaaacataccattgcattatattcgagacttggattgatatatgtgttttttaccaataagcaggacctatgtatatacattttctaaattatataccagtgtatgccaatatgtccactgtcagccttggaagttagtttactaccaccgggcatgatgctgcttacataacataccgagatcctccttaccgtaccgtcatcacctccactccgtaggtggtgcatcgttctacctcctttcccataaaacactcaaaaatctttactcctgtatgcttggtcgtggatcactgcttgaagtctacaatcctttcatatccctgtcctttgatcagattgggcagatcggttccagcattttacgaagctcctgataagtactcgtgaagtgaaaaccatcaacctaaaccacttgatcggattcatcctgcaacgactactcccactttacatcctaaatcatttgatcaaaaccaataccccttgtcacccgacttgacaaatctccggaccacctcggtctcctatccatcatccacggtgctactactagctttggcgcttaatttccactgaagtattgccataatcgataatggctggcacacggaattatgatttcctggttagtattcatggccgtccaaaattcgacaaatttccctataaagccccaacaatgttaactttgtcatagattaaactgttgttgatcggggactcaggcgtgggtaaatcatgttgtctactgcgattcagcgaagactctttcactccatcattcatcactacaatcgggattgacttcaaaattcgtacgatcgagttggacggcaagagagtgaagttgcagatctgggacactgcaggccaggagcgctttcgcaccatcacgacggcctactaccgaggtgccatgggtattctgttggtctacgacgtgacagatgaacgatcattccaaagtaagacccgcccgctccctctcccaattatgtctgaccttttttctttctttagacattcggacctggttttcaaacgtcgagcaacatgccagtgaaggtgtacacaagattctcatcggaaataagtgcgactgggaagaaaaaagggcagtttctattgagcaaggccaacagctcgccgatgaactcggcattcccttcctggaggtttcggccaagaacaacatcaacattgagaaggcgttctacagccttgcatcggatatcaagaaagggatggacacttccaagaccgaacaatctggttcccagggcgtcaatatagaccagcaaggctccggtccgaatggcaattctgggggcaagtgttgttagttgttgtatcactactctttgtcttttgcccatgatctcccccgtcgccgtgttttaagctaccacatgtttcttatttccccccgcgctttcttcttttccgtcgatatctcgtttttgttttactcgctacattatcatgtgccaagatctgaatgtccaagttttatgcctgaagagttggcgcctatggacattcgagtatcatacaaacttgtccatatcctgtgataccttgacgtagtttgtatacttttctacccgattctataatacattgtaggtacattgtaggtataatgtagcttgaaccggacgacccacttttcttgaatctttccattatttttttttttccctctttctcttttctcccttggataatcttctttatagttacttcatctcgaagttcatgaatagacccaagattgaagtctttatcacacaattgggacaatctcgttcaatcccactgttcccctcccccgaagttgcccctcccccaccaaaaaacccggaagactttctgtgctgggagtcttatacagtaaaatccgcccatgttctcaggattttaacatacccgacatagaagagaaacagagacagagaaaacaccaatcaacttttattacaaacacatcaaggtcctttctcatatcatgtctgacgcccgcagtttcactgctcgtccattgtcaaagcagcaggcacgcaaggacttcaaagatgcattccgtgtctatctatcttcctcttcgttagctgcgctaaggcttcaaacagagagcatctgcacgctgaggcaagccgatgggccgccgcagactgccatagcatggtatgcgtcagagaacatccagagcaccgtcatgcaaatatcaaggacactgcaagactgctatgacatcaagatcggagaaaaagtttctatcaccagggctgaaggttcgctagaaaatatcgacctagtgacattggcggactgttcagatcccgagaaaattgccaaacatggctcaatttcagaaagtgacagatcccactgggaatgggccttggatgaaaagcttctccgatgcgggtgtttgacgacgggcttgacttttgagctggagctcaagggccaacctaggagttttcgagtggttaacattcattcacagaaccctcactctcgtcatacactttttcaattcacagaggcttcgaaggtttcccttggcccagtcatagaaagaaaagaagaaaagtcctcagacatagccgtgcaatccactggtcttggaggcctatctcgccaaattgacgacatcaatgaatgcttgtctgattttaacattgatctgcggaagccagcaatgccatcattctatgagaacagcagagggattttactctatggaccaaaggggactggaaaaacaagtcttctggaacagatcgaaaaggccggctggaagcaaacattcaaaattggcatgtcaactttggggagaagtgtcaatgagggcgaggttaagctgcgcaatatctttcaggaggcggctcgctctaaccccagtgtcatcattatcgaccagttggaatttattgcccctaagcgaacctcggttgaatctcagtcccttgcgtctgtcctttgcgagaatttagatgctatccgaaataaatcgattctcgtggtagccgcaacaagaaatcccaatcaagtcgatgacgccctcagaacgcctcatcgacttggaacagaaattgagatacaagtccctaccgctcaggaccgagctgaaatactacatgccattcgaggaccagtatctgccggtttgaccgacgagctagtagagatactagcagaaaagacacacggatacgttggagctgacctttttgccctcctgcaattggtctgtcgcaaagcccgacaacgacaactgttggacaaaagctccacagccatatcgaccagcccgatcgaccagtatagctcgctccatggaggttccagcgatgatgaattggccatctcattggagatacaagaaacagatatcttgctttccctgcaggaaatccgtcccacggccatgcgggaagtattcttggaaactccaaaggtgagatggtcggacattggtggacagcatgatattaaaaagcgcctccagcaagccgttgagcgacccctgaaggtgagatttatattcgaatacctgaaaacccttgccttcaagactaatttcccctttcaacccttagtatcctcaacggatgcgcagacttaacgtgaacagtaaaaagggtgttctactttatgggcctccaggttgttccaagacactgacagtcaaagccctagccacagaggccggattgaatttcctggcagtcaagggcgcagagattctcagcatgtacgttggagagtctgagcgatcattgagagagatcttcagaaaggcccgagcagcacgaccaagtatcatattctttgatgagattgatgccattgctgctcgacgaagcagtacttcgggaggtgtcaatgttcttacgactttgctaaacgaaatggacggtattgaggagctccgaaacgtgttggtcattgctgcaacaaacaagcccgatgtcttggaccctgcattgatgcgaccagggagattggacaatattctttacattggccctcccgactttgaggcgcgtagggaaatcctgcgcatctggaccaagaagtctgtggtgaacccagatgtcgacttggataatctggcatctctgaccgagggctattctggtgccgagattgtgagcatctgtgaaactgcaggagatgcagcactcgatgaggaggaggaaactcagcaggagcaagacgtgcagtggaagcatttccaatatgcactgggacaagtgcggcggcaaatcacggatactgtcatccaagagtatgagagatggagagagggctataggtaaatacctacatatgtagactttactgtataataagagctataagtccttgaagccatttaaagaaaggtgaagtgagttgaagttcgtataaagtgtccctaggtgattaccgaatcaagttagtgccaaaatgcataacatcccttccctcaaacctcctctcttctcttttctctctcttggcataatatcctaagttcttcctttttatctctttcgactttcatattccaattctccattacctagctacttcctctacatatccaatttgtaccacttgaagccctgtgatccatttagcgcgccgtgcgctaaatcttcaacatgtcctcgagatcagctcgtggacaatcacctctccgttcaccagaacaggaccaagcacggtcccgttctttacatcgttctaaacctcgaagtgagagcccatcccgaagcctcacacgaagtccatcacaaggacgtcacgatcgctatcgttcaagaacccgatcccgatccccgtctcgtggcagaacccgatctcgcagtcccagccgagctggtcgccgtcacaatagccggagcgaaagccgctcaattacacccaacgctagccctccgagaagttctaaggtaagtgccagtctgttcctgctgtgatatagctgtctcccccccatggcggaaccatatctatgaaactaaaagctgatttccctttttcttaacagatcgtggtagaaaaattgacaaagaatgtcacagaaaatcacattcgagagatattcgggggttttggagagatagagtacctcgatcttccaatcaacaaagcttgtaagactcgctttttgactcgcgattccagattcatatgtctcctaacactcttacagtcatgacaaataggggaactgcgtatatcatttattacgaccccgctgatgcggaggcagccattgcccacatgcacgaggctcagcttgacggggccatcctaaatgtctcaatcgttcttcctcgccgtaaattctcacgctcgccaccccctgcgtcgaatcgagtgaatggcggccgccccagatacggcagagtcccatatgcaggcccatcatcacccagacggcacggaggcggtcgacctacagaccgccatgacatttataggcccaagactgcatcaagatcacgatctcctgttcgttctcggtcatactcctctagatctcgctcaccggcgctgcgcagaggtagtccccgtacagaatcgcgacatcaccggcgccggagcccaagctacagcagctatggttacagcagtcgaagtcgcagtccaaaccggaaccgagggcacaatcgaaagtaaacagcgagagttttgcggtaccgttccttgttgtgtatcggttcaactctagcgggggattacgtttgatctttggtgccggcaaccgaattctatcgcaagatatccagagtagctagttctacgcaatagttaacaaattccactgccactttgaaatgtaaggattacaggatttctctaggtagtcagtatgtataataggatataccactagttaagtaatatatgatagaagcaaagaaacaggggaggatggtaggactacaattttgtatgcatgacttggatggaatgtatcacctccaataagagaaatcatcagaaaaacgaacaccatccgatgtacattgacgccagttttttcttatccgttgcttgtatgatcaattcatccacctgaccatccaccgaaagtgcaatgggctgcttagacatgaagccgcggagtttgtttcgaacatcttccaaaacgccagccggtgtgtccgggacatttacatgggtgcgccgctaggataaagagagacttgttaggaggttgcttgctgggaaccggtgttgaaatgtactcactctcttcccaataaaatcagttgttggatcatgcaaaaacgtctcgagtacagtcatcaaggcatcctcattttgtcgcagcaggctaagtgtaatctcacaagtccttctgaagggacctataccttggagattagcgtaggagtaaaactcgaggatatcttcaaactaaccattgtacccgtaagcgccaaaggcatcaaccatgttatgagtcaatcggaatggtaccacctcgggcttttcgaacgtatgacccttgtcaaagagacagttaaaatcaacatgtaggaggccgcctgttccttcttcgaatgaaaggttctcgccatgtcgatcgcccagacttgtgtagaaaagaaaactggttagcgcgatggaactctagggcattaggcgaaagcagatggagggccctcaaaacattaaatggcgagagaacatacccaagaacatatcccaccattgacatcacagcagaagaccgtgtataccttagtctcgctgtgaaccaagactctgtctcaggaaacatttcgatgaaccattcatgaaggaccggcgggagcctgcaactgtcagtacgctggactcatgggtgattgaacggaagatttacttggccagaatgttagtagtgaataagggcaactttgcgaaggttcgatcagcgcagatttcgttcaaatcatccctgatctcgtggaactattgcatacattaataccacagtccgagtattgtgttagatgtggtacccacgttcggttgaatgcctctttctcgtagcaacttgatgatgatatctctcattgtgcggagattatcaacccattcaatgagaccacattcctcattcagaggtgtcacagcgtatgtcttgatgtctgttggcgggttagcctttgtaattgcccaaagttcatcaaatcacttacacatgcgccgcttacttgattcaacgtctctttttaggaaccggttgatcatgttgttgaattccatgagacgttgatccttgcgtagatcatcttttggtttgcaaagtgcgttatagatcttcccatcagatcctcgtaggctgatcttgcgtggcttttgaagcgagctcaaaatctgtgcttcatccaaaacagctaatttcggttagtttgtctccgcgagaataggtagctaataacgtaccctcaatggttgttggatcccgaggaaaggccctgaaacctttaatatattcggtgttctgactagcagggagacttgggatcaacattgcctggaaagggaccactaatcggcatggcgcaactttatgattaaaccctagattacggccgagttggactcgagatgacttttcctccacaggagcaaggcagagttggagtagttcctctgagaactttgtaccttcagtgatcatgcgatggatttctgacgctgttgatgattccccctttgacttgctaccgtagtcctgaacaagttagtctctcataatctgtttcaggcggacgacacgtactatgatcttctgtaggcaattataaccccttttagttcgttctttattggaggacttgataacggcaagaactgtccagagaccttgctgtgggaaattatgaacagcctttgccacaatccgtgtcaacagatcatagactgtgatgttagggtgacagattctggcaaccacttgtggtaggattgtgaacagctacaactgttagctagctatccgggaaaatcacatttcgtaaactcaccagagccgcttgcaagcgtttgtcgatgaacttcttcagttgcgcatgcatctcaccgaggctcttcttgcgttgcgcttgtgtatgcctctgaaattccctagtgtgtgatgaatccgtcattagcaaacatttaccaatggccacaccacgaaactctttcttactcgttatcgcctctcttcgggtcaatgggctgttcaacaatcgaggcatgttcaagccaaagggtcagaagttttggtagagtctggaagacatatttggtcccatatgttagcgagcgaaggtaattgtcaatgacaagttttgtggcttctccactcaagctgtgtaatattggttagtctcaggtagggagtagcaggtctgatcaactgactatatctgagcttcctttcccataggcttcgctttctcggactctaaaattttgttgtaatgcttccctaggtaatagtgtgccctttcccacctgtttatccatcagaaaagaccatgttaaagcggcagtaatctaacttacttcggatacagcttgatagcctctcgatatctctgaacaatggcctgagagtgggtctggccagccctgtctgtccatttggctagcatcagatgagcctagacgcgttagtattctagtccatgtgaactgtatgcaacttacgagagcagtagactcattttgattctgcccacgaccagagagaaacgacatggcttcaatttcgactgaagaagatatattcggcgtaacttcgttggccgaaatcgcaccctctagagtctgaatggcttttcgatggtgtccatccttccaaaggagtcgcgcgtgctctatggaagccgacctgtctttcaaccgtgctgcattgagcatcgagtgatacgcttgactgttgaagttgcctttccttgaaagacgagcactggtgagccacgcagcggatatatcagaatccgcaaactcgcccctgtattccaattttagctatctatttcgtgttttgtaggctacgaactcacgctagctccattgtggctcgtcttaatcccaataggtattgtttatcggaaaggtagccacccaaaacatccaaccgtcggtctagggcacccagcaagcccgagcgtgattgacctgattgtgctttggcaatggattcgacctctgacaaagcatgtaaccgaagcatgtcattatggcatgcttgtagtgaggcaaccgaatttgtggtcagtgaccgggcaacgttgagcctgagctcgttgattttatcagtaaatgactcgtctttcttttgacgaagagcatcaagagccaagcctattccaacattgaactcttcagtgccttgtttggcacgaaggtcaagatatccctctagcttgtcccatctgctcattatccacgaagcttcaaccgcgaagggcaggaaccgtgaagccgccgactcattttctttgagaacctcgaaacgagtgagaacagcatctagataatggtgagcaagaagacagagcatgtaaaaactatctcatgtttgatctaaccttgttggccagattctttgagacaggtcacaagattccattgcgcatcgacgttgtcaggttccttctcgagttgtagctcgtaccaactctgcgccgtggcccatctcccagctttccggtgctcaaggatctgctggtcgatgtctagtgcggacaagtggcttgaaataccctcaattccatcgggttcatcaatctggctatagatgtcttgtaatctttggtatagaggctcgaggctggatctctcttgtgattccccgtgaaccttggattttcgaatgtactgttcccaatggaaaagtgccttggagaatgatttacattcaacagctcgcttagagatgatctcgggcggtattgaggacaagagattttcgacagacttgatctgcgatgagtatttgtcaatgagcgtgtcacggtttcgacctttatgggaacgactcgtatggttggaattgtgattgaggccatttaaatgctttttcttcccttgtaaccatcgagacagatagtctagcacttcaaagacgctctatcgaagaaagggaaatcgtcagtactgggaaaatcagtgaaattccacgaggattctgacctggctactgctcaaaattgtctcgcgagcattgttgtttgtctccggaatgggatgtgaaagaacactcatcaattcgtcttgaagattttgttgttcttgttcagtccctcccacgatacggttcaggactgtaaatggtaaaaggaacgaagagatggaaatatcttgacccttcacaacacgactcgatattgaaaagaccatttttgcgttgtctccattcccagtttgtagaagatcttgcaccagcgttcgaagccactcactgtgagtcaatctaggggaaaagagcggatagttaacctcagtatgattggccacaacagtgactgtataggtagatgtgagaaatggcgtaagagtgttgcgaatactttccggaagctccatccagcgttggtatttctcatcgccttgcaaatcgcgagagcgttgggtcattaccgcattcagtttgcaaaatttgagcaggccttgcatggcccatgccagaaaaccctgggccctagtattggaagcagacaagaatgcatcaaccaaaacatgctggaggaagaaaagaataaatgcgaccgtttcttccattctgtcaaagttggacaagacaagtatatccttcttctctttgatggtttcgactcggtttggatcgaggcagcccacaagccctaggcaccgagctgacaataaagtaatgctgtctgatgtggtactgaacttgacacaacagtccaacaatgacctagttaactgagcaatcacagggtctggttgttcactcagaacagagtcatggagaaattcttcatttgctgacagaaaaggggacaactccattagagcttgttcaacaacggtggcattttcgctctggcagcgacgaattaacgccagaaactggcttcgaacgtccatttgggctctcatgtcattaattttggcatcaaagacagccatctcaggaatggatgcaagggagggcatggtgttgaatgtatctcgtacaagactcgaatgattcgtcagaatatgatcgatgagttgacatgcgcggttcctgctctcgtcggtcagtttatcccaatatctgatcacaatcgctagcgtttgatcaattattggctcaaggtcctcttcgctaagagaacttatcaacgtcttccacgcggagaatgcataatcacacagttcctcgatctccagcgcagatcgaagacacgcacagacctgagatttttagtacctaaaattgattgattcgcaaggctgaatacatacttgaggcaatgcactgctaacatgaccctgggcgatattgatcatctcttcaatggctttgatgtttcttctcttctctgccaacgtttgcctcacttggaagtcattaatggcattcgcgaattgtgtgataataccgagaacgtgctcctcaatgaagtggcttagatccgctttctttgatgagcttccatgtgcaatctttcgcggaacaaacgtagctaatcgattcagagcttggttgaactgaaaactctcattagcggtccagaaggggtgggggaaaaaaagacataccctctctttcttttgctcgcccgcatcgccaaggctcttcagcaagtcacaagcaatgagaattggctcaatcctcaccaactccgccaaagaccgacccttaaatgcggggtctatgtctgctagaagagacatgatcataccctccgggttgtctgatttctgagataggaggaaagcaagaattgcagccaggttattcttctcagagcaaacatcaaaagcagactcgccttcattgcgactagccccaattctgcaaattatatctcgttttcgtgtcagaactaggtagggcaagatatggacttctgtcaaacgtaggaaaccatcaaccttcatgccaagcaaatcacatagctgttcagccatatacgggcgagattggaggtgcttgaccacagtcaccgatagggtcctccagtaaggccgaaagaggccagcaggtgtcaagaataattgttgggcaagtttagataactaaaatcagaggtgagctgtcaccatgtctgttgaaatgaagagcaaaagtaatcagaagtataatctcgggggtactcacctcgttataagccacagcgcaaatgtaggggtttggatgaccaaggtactccaagagccgaaggagaatgatgttcttctcttcatcttccgagccactagatacaaaaaattgtgagatgacatgatgataattttaggaaatagaaacgcacattgctagcccacagagtgttatgatacaagcttcctgtaatggcatatcatcttttccggaaagatttttgagccactcaagcacaacaacgaaattggcccgacgaatatcagttgataaatttgagcgcacaaaagctaccacggaatgtctatataatagtcagtatacagtgctagtgtgccttcaaggactatggaacgcacccagttgcaacacgcaattctctgattgagctgcggagcgagtgcagacagaattctccgaagtcagagtttggaatatgcatttgattggaatttggggcgtgcataagaattcttctgagtgcaatcattgcagatatccgaggaccaggcgtgcgtgtaagcctgggtaggatgaaattgaatagtgaccatatctcctcgaatccagaatgctcctcatttcccgcatgaccattctgatattgacccatatcgcatgtttgacaaagaagcgtgtctcgttttatgacatgcgaggacttcctcaaaagctgccctgccgttgcacagcagatttttcctaggatgtccaatagctcggtttttttagattcggacagttcctcgtaagatgcccttttacacaaataaatcagcatttcacaccttgaggggtatctgttgtccactcactggatggaggtgcgtagatctgccatcgttttgccacagtcagattgaagaatcgctgatatatttcccataagaaaaaaaaacaagccatgattagtaggtcctgcctctagtcctgggagacacagccgcttcgatgcccgggcatattcattcggctccgcttggtgtgaaaccccggctctctggaatgccgtatccgattcctcgtaaatttcccctattgaccctttaggtgagcacacagtcaacggtggtactgtatctagaagctgggcatgcaaggcctggagagaactctgatctggtattagctcggtgacccacctgtgctagacatgagataaagcttacccagagacacgactcaagggactggatgctggaattgtcgtctttgacattagttaacactggaagcagggtctccctcaattgttgtatcagaggctgagaagattttgcggtttctgtcaaatcgcgcaggaagcgacttagaatgacctgaacagaagacaactttcctatgttcccaaggctcagaaagccacacaggcattgggaccaagtataagtcaggctcatgtttgagagcagtccagccaaagtcgattctggtacacagcagcgatgcaaatgagtcaaatattgcagaggcacaattgcatcttccgaggtgagttgggctcctttcatttgcaaccactcgataacaacctgtctaaggcgatggaaaccattcaatacccacgagaagttttgccggaggatgaaatcatgatgttttacacaggattgcgtttcgcccttcggattgaacgaatcaagcaaccgagaggctagagagattgtctgcggaaagcctccaagggccgtaatgctcttgaataatccaggggggaggcctagactttgagtgtcctcaataagcgatccatttgcggcgggtatcgacaaccctccaaggcgtgtaccccaggaactgctacgttgaaatgtttccagagagcacaaaatatctagggaatgtcaatttggcccaaatttttacatcatcgggggctagaaacggacctgatgtgcaagcacgcaaaaacgcagcaacggcgtagcttgcaggcaatggacggactcgcttgaacttagaattagctaggcgcgcgcaaataagttgaatcttttcccggacaatctcggaggtccaggtggtggcgagtcggatcagtcgtaggattagccaagcgaataaaggagcatgtgtgtcctcacccaggatgatagggtcggagggttcccacagagcttggggggctttctcgatgctggcctgaataatatctaagcagtcgaggacttgcccttccagatcttgctctgatgtgctcccgtttgggctaatctctaagccggcctttaagacaatgcatatgagtttgttgacatcagtgacaccttcgtcaacgcgtagttgactttgtatctcactaaagatttcctcgcgaagctgggcgaatgtttcccgggttaagtgtgattcgtttccctgggttgcaagatgcggtacgaaacgcgaagcaaggatcgacgaggcaggttcagctctccaagcgttcccaggcgcggtagcctgctcattatctccctcgattgccatatgggagacacatgttcatgggaccaggtttaaaaagttcaatttctcgtgtttacacaaattccgaggccgggttgtgttcgtgtgggtgtttgaagtgcgcagatacgcggagagagttgatatgtcgattgacacctgaggcaccaagtatccactacacgcacacactctgtaatatcagagcttagttgtgatcattgaataccggtttgtaaattctatacattagccttatatctatcaagtcgagtataaaggcctgggatggtgtatggtcgggtcctctacatcgtgtatattgtagaaaatataaaagaattaaattcgaaaaaattcgaaatcgagacattatgatccaggaagtcttaagagagttaagagaattccggagtatgtgaatttcacatatcatgttgggccttgtgactcagagagttagtcaacctcactttgaaatttcaggtaccaccaccacctactccttaccctcttctaacatcacttcctaactctgagatacctcgccagtcaccgaagtcaactcagataagtgcaacatatacagaaaatatacatttcgaattggctatggagttcaagagtgactccgtaatggatgattcgagacatggatatttcatgaagcaagccttgttgatggtacgaaacttcttgatgccgggaaatcgaaaaatgctcattgaaaaaccagggcgagaaggctctccagtcaggcgagacacccgttggttgtgttctagtgtacaacgaccaaattgtgggggttggcatgaacgacacaaacagatccatgaatgtgggtggcttctaaagatcccattaaataccgctgaccatccccaagggaacgagacatgccgagtttatagcaattggagagatgctccaaagctactctaggtcggcattgcaatatactgatctttacgttacggtcgaaccctgtgtgatgtgtgcttctgccctgaagcagtaccgcatccgcagtgtgtactttgggtgcgccaatgatcgatttggaggcactggaggtgttctttcattacattccgagtcagtacatcccaagaaacgccgtcgaccgattgtgcagggctaatcggatacagctcctcaattgacccaccataccctgtctacggtgggctgttcaagacagaagcaatcatgttgctccgtcgtttttatatacaggagaacgaaaaaggtaggaattagcacgcacataccccaaccttgattacctgctgattacattgcagctcctaaccccagaccgaaaaagaatcgagagctgaatactagattcgaaaatggcaatgaagaagcgccccaaacctggtaggcggcaaggatgagatttagggggtctccaaaacatcattttactgcgcaatacctccagggctagtctgaatttgcccccgatacaagcggggaatcattactaccaaaggacatctccatataagtttgaaaagcgtcaatgttgatcagaacgggaatctgtattgtgaatatcaattgcgcccccaaaaacacacacaaaatgggatatgtgtacaaatctgcaacactgaacggaaaggctgcccatcattctttttttctttctagctgatggtgtatttcatgaagagccagtgcgctctgcctccaattcttgctcggcttgctggtagtatttggcagtgtccacgccatgctgatacaaaaaacaatcaacatcatccctcccaaatcgactcaaatggaggacttacctgatcgtggttgacaaagttgaaccatgggacaacatggatgaagagttctgagtaccgcgagttgcgggctgccatgccttgtagatgaggcgacatttgggatttaccgtacagaggctcgcccttcttgaccttatcgaccatctcacgagtatccatctcaacctccctagcattctcagtgaagccgtagaagcgctctgtgaaggtgtgagtgagatgtcatccaaaaaagcgggtcagagttcaagtggagggatatgacttacggcaggatcgctgatagagcacatgaagaccgccaagcagaccaacagctgtcgcgagtcgcataacaggagcgaagccaccacggcctacatgcgacggacttgctctctccatgatccagagcgagatgggagcagccgaggccattccgccagccacggcccagtcggaaggccgggcatatccgaacactcgtttcaaatgcctgaaaaagatataagcttgtgataaaatcctagaatccggggtaaagcgtacgggtcggaatcaatcaactgtgggatatgttagccaaagacatacgcaagcaatcgggaacggaaacagtagtagccccggttcatgttagatcaatcataccgggtagtcagtattggcccgcttagagggcacaatggctgttttggtatcggtcgccatgttgcttgaagtgtggatgtgcaagcattcgaggttgaagttctgggagttggaggagggcgaagctaaccttttggggactagcgcaatcaaggcggacaagaggtctgacagccaatcagagcgcatgtaacaggctactcgcgtcacgcgtcaaggtcgcatctgattgattgacattgaatttcaagatagcatcccataccgagtacgccgtacacaaagtccaactgctccaatccaacagccaggtttttcttttttctttttctttttcgttcaccttcagttatctggtccagtcaaatcgatcacttgatatagttgtacccacaacggtacctgcacgcgattagaaatatggcgaacgcgaatgtttcagagagaggaagctcaccaacagcagatgatttgaacgatctgtttgattatgacattggcttggatgagattattccggataataatgctcccaataccaacagcaccaaggcctctgggataggagattctgcacttggtttgggtcttgatgaagaagtcaaagtcgcaaagaaacgacaacctgtggctaaattagatgagggccggtgagtctcacttgctaccttctttcttgattgaaatctgttatttttttgttttgtttcgggagagcatttggggctgcaacaatgctgacgaataggctagtttactctcacaaccgggcatacccaaactacgacatactgctagacagaagctgaaattcaagggcaaaggatacgaggtttgttctcttgtctatccaaaattcctaatgcatggctagtgtaactgacttgagttcgctatagttcaaagacgccgcacgcctgctcaacttttaccagttatggctcgatgacctatttccacgcgcaaaattcgcagacggactgacaatgattgagaaactgggacactctaaacgcattcaaaccatgcgacgagaatggatagacgaggagaagccgagactgttcgatagctctggacccacgcgagaagagctcgaaaatcgccacgtccccacggaccctgcagattccaatcacaacccaaccgcgattattatgggccaggaagagattgccgaccaagacctatttattctagatccaaacgagagcgcggcgcctactgtcagctaccccgagcccgaggacgatgacttggaggatcttctcagagaacaagatgagccaatgtcagattttccacccgacaggcgtatctcatcttcacgagcaccagatgacgataacgactatgatgccgaatatgaagcgatgaaggagcttgggatgtagttgtggaaggcattttgtacgatgagtttttaatgacagcaatggtatatgtttaccccgggataaacccgctggttcctgtttaatcgtttcgtttcggctatgtagggctcagcttgggattggccgaatgagtctgaaactaaaattactaggaataccacattggatcacatttaaggaaaaagaattaatttcaaataacatgctaactgagtagaataactggagactgcaaagcaactcttcatgtactgccccggaaacgggacaagacgaagggagagaaagagacattagatgttacagtaaaggatgggccaattgaatatattgatctcacgcgctggcaggctccgtgaacacagagaactgaccaccggcacccgcccagttcaatttctttccacgagtagcagtgttatcgataacagtagccacctcgatgtcatcctgtgtaccttgtcccgtttgataggtagcagagaaaccccatgaccatgcacggccatcggaatcgatagcgagagaatgatccgaggcagccgccacaaccttggccttgatacccggaacaggggtaggcgcgatcaggatacgggggcgatcgcgctcatccttgataacggcgtcatcggaaagtgtatcgatcttaaggccgctttggaaaccgtcaagacggccccaaaccaagcattcaccatcgccagcaatggcaatcgaatgatgagcgccgccgcagatttgtgaaatatttttgtcagaaagtgattcgacaagagtgggatgcacgatagcagcttcatcgtcgccagcgccctcgcggagggcggttgcaccgaagctattcaatccccaggcatagaccttgccagtggcgtgaacagcaaacgagtggtacgagccactcccgatgtggacgatgttcttagggagaccgaactctcggggctgaagaccattcagcctgttgcgctccacgatcctgcgaccgagctgattctgttgtcctgagccccacgagtagacgcgaccttggtcgttcagggcaagaacgtgattagctccgcaagtcaggtgtttgatcttcttcaaagacgagatcaaagttgggatcgtttgaacgtgagaagacgcgtcaaatccgaggattccatcgttgctctagaatcgttgtcagtaaaagcaaagtaattcaaaacagtcagttcgtcttactcggaaggtgccccagccatagactagaccatcatcggtcaaggcaaagcttgcgctatcggcggcggcgacttcaacgaagacagtgccttcggggaaagcggtgacgggaatagcagtgggaatagactcccgggggtttaatccactgtcttcatcatcggaatcggaatcgctgtcgttctcaatgtccttgtatccaccgtcccattcagtttctcttccgagcgcaccctgatcgttcacaccccaggagaatatcttgttgtcatgcgttagagctagacagtgcatgccaccgacagcaacctgtacaactccgacttcttcggcagacagaagcttattcaaacgtgggcgcttcacatcgataacattcttagctgtgcccaaccccagctcaccagagctaccctcaccacagacgaatacattcagtttagttttcggggcctcgttgatgataactttgactttcggctttggctgacggggttgcgcgacacgagatcttttgatttcgcgaggtttctcctcatcttcatcagctttgcgcttcttcgtagcagaggtcaatttggtagatgttgccattttgcttggcttcgcagttgacttggtagatgttgcagtcggcttcgtagtggactttgtagtggactttgcagtagcctttgcagtcggctttgcggtaggtttttcaatggacttagtggtggattttgcagctgcctttgtagactctttcacgggggtttcggcctttgtcatagtgatctgcctggcgctggtgcgtagtcgagtacttctctttaccgtctcggttgaagcctcgacgggcttggacgtgttcttcttaggaggcattttgcctcaaactgggctattagaaatagcaaagaatgagaaagaacagggggtggggaggaatgtttgagactggaagaataaaagggaaaaggtatgtgaaggggaaaaaagagaaaaaaggacgccaagccaaaaacagccaaacaatagcacattctctccccagccacctcaatgggctgattcattgacattcgttgatttttattgatgattaacgcgttgttacgcgtgaatatgttttctttattgatctatctatgaattgaagagcattatagaattacaatagcccatcactgcatcaacggctggtttcttcacgaatctttccacacataatcacattttgtcccaatggcatccatttaacttctcgaggattcaacgcagcattgggtgtaccctcttgatcttgtttcgagtcagggctgacattcactccaccacggcccaggtaggtgggagcaaccgtgacaataatcgagtcaatgaagcttgtatactctggattcaacaattcactcagaaccgtaccaccgccttcaatcatgacacttttaatgccctccgatgccaaggcacgaaagacggcttcccagcgtaatcgccagtgttgattgtattctacaatgcggagaaaatctccaccgtagcctttgagcatcactagtgtctgagggttgatttgagctcctggggacaacacaacccatggagctttgccttttccttcaacggcagtacgtaacatccggcattcaggatgaataggccatcggcccataggatcaatgatcacgggccgtggttgccacattctccccaggcctccaaatccaccggccccttccagacggcagttcagacctggattatctgcaagaacagtccctactccaacaagaatggcatcgtgtcgggagcgaagataatgggtcatcaatttggcctccggtcccgacaataccgtctgcattcccggttgaagagaaatcttggagtccatcgacgatgcgtacgacaatgtgacatgggggaactctcggcgttccgagtgattaggaagataaggatgtaagaagtctagcgaaaactgagggaaggatagtgtgtccgggggcaaagctgacgagatcgaggttggttttgtttggggtgacacctcgttgacaccatcggtgctttgagttttaacaataccatggcccttttggtattcgtagccctcgtgtgcgaccagattcacctctgggttttgtatacgccacttggcggagatattgcggacgtccgtcacagtgaagaatcgcccgccagcctcaccaagcttatctggctcttcctgaaacttggtgtaaatggaagaagggagatatcccttcacagattctttgcgcgcgtactccattaatcccgagtttcgcttcactcggtcgatgtagtcgaggtcatgtgagtggatgctgcaactacccggcgttctcgcgatggtgacggtcgagtatgcgccttcaaaccggacaaccttgatttgaaagttacagatgcctccctctcggactcgctttttgcgagggcgcttgccttctggtaaggggcgagtttcagatgtgcggtgtgttggacgccgtaaacggcacatgtaatagtcggtggtgcaatggccctctttgctcgcatttgatctttgtttgacccatacattgtctataaaaggccaatatgtttcaaattcttcgagactgatttctatcgggtccttgcactcgaacaggaccttgcgtatgcgtgctaggttcggtggattgttgaaaaggcttggggtagccttcgcgccttgactcgttgatacgctgctgctgtgagcatctccgattgtcgcattgcgctgtgttgactcgttcccgtcaccgtgtaatgcttgtttatcaagggcaccggataaattgatgggggttgtgatttcgggcaggtcttcgtccgttgcgtctcgtgtatcgcaggcccgtccgatctcttgatctgttcccagaacgtctttcgcttgcaaagagactccgttgtgcggggatcccgcctcgctgccagaagcctctacgctcgagacggacacgtcggaggcatggtccatcctgggggagcgtggcaaaatatagctatagctccttattcctagctatggcgacaaatggccatttcactgcggagtagccctaaatagacacacacatatatatatacacgatatagagcaaagtgtcggagaacgagcctcgggaagaacttagtggggcggaaacatgaaggcccggagatgttatccacgttctgaggtcgagtacggagtatacatgtagtatatcaacagccaccacctacatgtaccaggggaacatagtccacagattgattcggtcttagaagtcaaatagaaatccataagaaataattgatcattgcatcttcgcttgattgtattgtcggagacaaataagcacaaaataagtattccagtatctcagtatctcaaatcacatctaatatgccccgatatctgccccagcacgagccagagtctcatagacccgtggtggcaatttgtacttgaccattcccgagaagaccatgagatccttggccatgacaagcaaagtatccgccaatccctggcgcacttcactgtcgtaaactccaaaggttcgtttttggcgttcatagccaatacatgtgatgctccacatgatgacaggtccgatgttgcgtgaaatgatgggtggcaaagacgaaaaagcttgggccgtgcttcgaatgtacgacacggagccctgagcttgcaaggggagaatattcaaagcgttgatagcctgtaacgttcattagtaattcaatcatgaaatagaaccatgggttggagacacctacatcaagagctggcgcccatctgccggcttcaacctgagtctttgcttcgatcatacgcaacagcaacccacaagcatcacggttgacctgtcggatttgcccgtaatacattatgtctgagtcgtaaagactgatcatgttcttggcaagcacgcccggatcatccacggtagtcaaactgaggctgctcccggcttccactgcctctggctggctatcttgattctggtcgacccttgggcgcaggggctgcagtttcggcatggcaccccctagttcaaccgcgattgcatctgacaatgcacggttgatgatgtcaatgacacgatcgtagttctctgccaagtggtacagaagcacggcatccgcgatcaatcccttatcatccgccacggcagcagcttgaacggtaatagtcttcaagaattcttgctggtcgaccaacttgatcaaatcgagacgttgctcaatggctcccttgaggcgagtaccgtccgcccgaatatcgccaagcaatttggcaaagtccctggtttctagaatgaactctcgcaaggcctcatggcagactgatgcttgggacttgcccagagcgcctggaagatctgcgttgaggcagatcagtgtaaagtaatcgatggcagcttcgacaaatccagtgcggaattctcgggtgtattgggtcaagagatatccgaaattgatctgggggtattgcttgactgtaaaggaaactgcaaagggagaaaattttaggtcagcaagatcataatatcatgacagaagataggcttacgaatttcttcaccagaggtgtaaaagtcggaaacgcgcaaaagaccataataggatagggcgatggcaaagtgaacagcagtgactggggcataggtgccgagataatgcacagcctgctcaaacattcctcccaatatctgcagcaggaagtaagttccatagccaccgggtccctcattgcccttgatgaagactctttggccaatttcctggatgtcggtttgaatatcctccaggccgaagacatcacctgcaacctcttcggcgcggtcatcctctcttgcaaggctgaattgtagccacatccagtcctcgacagtctgcttaacaccatccaagcgacgacgggatagatcacagcggccaattatcttgtagcacgccattcggtaaggatcgactgtattttcaggtgcgttccgcgatcgttgctggaactcgccattgatcttttgctgcaagtccctgggcagtctcctactctgcgcgtaggttgtcatgtaggtcacaaatttgtgatctaaagaccggaacccgctgtcccgactcacgtattcagcagcctcagtgacaaagccacatcgaagaaggtagaagatgagaatccagcagtagtcttggttcaccatttggagctcggtgccgtcaggtgccagatccttcctcgcggcttgaagacggatgtaggcgcgaatcttgttgatcacggttggaattcctcccaattgtgcttcccgtggatttttcgcaatggcggtttccacttcgtcgaagaatgtgctctcaaggaaacctctcgaaccttcaaggatctgtttcttgagttctactgctttgagagatttggacgattcttctagataatcttcggcatactgtcgctccttcactgctccgggctccgatggattcatgatgtttggcttctcgtgaacaattcttatcaaggcttgatatgcgttgaagagttgccgaggtacctagaaaatgattagctgggacaaagatacaggttgcgcgaaattttgaaacttacatcaccaccagcttgcacttcaacatatgagaattcgtcgagtatgggatagcattttccctgaagtctggcgaggttcaactgttgaaccttctcggcgtagtggcccatcttctcacgttggaacctgagatcaggcgagtgagccgcagttccctcctttcgctcagctggatcctcaaatatttgacggcttgccaagccgaccccaggtgtgccaatcaccgacttctcaagaccggaacgtccgaatacgcttctgcgggatgccgttggaggtccgttggctgaagcagttccggtttgcttagactgccgtgttgaacgcccaaaggcacccttggtggtagatttaagtcctccagcgccggcagcatccttctgggatagcccgaaatgatggaatattttttgacgttggtcttcccagtccatgtccaccttctcctctaaaaaagcatcgaagtcccgctgagctctggtgagaccctctgcgatcatgacttgtcgaccacgttgctggatattccgcaaaaatctttggttgtctgggtcaaagtggtccatttccctcgctggagctgctagagatgcctgggggtccagggacttgaggtcgcgcaatgcttgtcccggggatacgccggaagctgcgagaagataatgactattgatggtgccgcaaggttagtcaaggtcaataagaaaacatgcgacaagatggaactcacgctttgctgttcttgccgtttggggtatccttttgtcctgtagagcctagctctcgcgccttccttcgaatgtcatccaggcctaactggagactaggcacgtcttcgaagttgttgttttgaaagaccgatgacaatggtcgcttttttccacgttctaataggctgttgaagaacgcaggttgtgttgactgattcgcaggttgtccctgggtctgcaagttgctagcttgttgtgtctggcccaaggtcggggcttgagcgggatgttgctgggcctgagatccgaacagagacgacgtttgcgcgccttgcgcacctggagcagaaaattttgcgaaaggacctgccgtctgattgtttgcgccaaacaggctgtttgactgtggggttgtcgaggctccaagaccccccccgaagagagagccagtgttgaaagccatggagggctggtaggtgagaaagctttgagaaagaagatctaaactaagattgcagaaaaactattctttgaattagttcactttgagctgacaattgagctgacaattgagcaaaatgatgctgatcaaagggcaagaaaactgcatacctagggcttcgtaacagtaaagaattaccacgataagtagtggattttctcggacttctgatagtaaggaacagagcttcagcagagctctgcttttatatggataaaaaatagccccgcaattaagagtcaatagattgtcaataggcaattgaagaggctgtttaggaagctcggtctaaacaattgtatcccggatcatcgattgaccgattgaccgaaatcctattgttcctttatttctcaatgaccggaaccattgaacccattgaacccaataaaactcccattcagtcctccactcgataatagtgatccatagattgattcggaaatatgcctgtgttccaatccaaaacctttcgtcgggcagctacggaatcatcgtccctcggcgaacggctcggtgcgttctaccgggcgcgactggctcgacaccctttcattctcttcggacttccattcatggccgttattgtagccgggtcatttgccttgacgcctgctgctgccctacggtacgagcggtatgaccgcaaagtcaagcagctcagtcaagacgaagcatttgatctcggacttaagggtcctgacggggaagagggaatcaaacgcaacccacggaggaggattataggcgacgaaaaggaagaatactacgtatgtattgttttattgtttaattaatcctgactttcttgtctgacatttggactgaatgctgattattgtatacgcttacagagactcatggccaaagatctcgatcaatgggagcagaagcgagtacagcgattcaaaggtgaaccggatggaaggctgtaacactttgaatttaaatatccgagtgcatcctcgaaggcgcggaaaacacgttttcctcgtgacctcacctggcgcatgagctcaagcctcatcgctaggtgtacgttgccgtacattgctgtgtggagatgaaggaggagctcagggggtgcagccactcgattatctggctggccttcgcgtacgacgtatgctatgctccaatatccctacttaggtagccattggaattggtctcgctcactttctcagcctctcggaagttgtatacaacatacaatgtctatgcttcctggatcctatatactaggccattgactgtggaattcggggaaatatatatttccgcccctctccagtctgttgcctcaccttttctgtatggaggtgaaacctgcatgggtgggaccactccacggttggttggtcccttggagccttgcaactaaccgggaactgggatgaggtcattgttaatattgattcaacataattcagtttatgaatacaccgatatacaaagtatatattgatctataatgaaaggagacttactcggccagatatagctactaccgggctcccaattatctctgtagtgtgagctacctctatatatatctatgtatacagcaatcactatttaactattcgtttatcgggaatatatgtactatatatagtgaaataaaagcgacctacaaaaaaaaacatacaactacgtcaggactgaaggtgaacccgtgatcccccacacaataacgtcataacttttcttctcgaagcccccaaatttcttcttcacccatttcctctcaactcagggctagttccaggcgattattaatcatgcaataacacagattctctctctgatatcagacctgttcatcccccactatttggcatttttcgttccattggccaccgattttcttctttggctggaccctggtctattcgcttcttattgcccctctttgtctctcgctacgtcagttgcgtatatcgtgaggttcttccatctgaagttttgcgtacgcttcccttcactttctatttgaggaacaacatcggtttcaactttgtgtattggatgccatttatgaccagcgattctcttcgttcctaggtcttcaaaggccctgatatcttggtccgagagcttgggagcacttgtcagtctcacccttgagcagccgcttgcaattttctgatacgcaactacgggtgtcattgtcagagagttttgagctgactgtgtttcctcggaccagaaactggagtcgtggaagctaagctgcctgccatgacaggccctggacgctcaccctcctcgccatgggtacaaagtgcacaaggtggtcatcatgatggtggtgtcgcacagtctatccagtctaccatgtccccaccaaccacgggcatgatgtcgagcacggcttttacagaaaaatcaagtcctaactattttggtatggctgtgcaaaaccccaacaatcaacagacttccaacccagggctgtccatgcaaaataactggggcacattaccccatacgcaacctctgccgagtccgcaattaccagtgttttctcaagaatcagtatcagcgggattgaagaatctattgaagaccgagcctgaaactagccgcatacgccgagaatcagcattgcatggatcttcttctccccagacgacttcgtggtcaaagtcctcatcttcacatccgttgggaaatttctcattcgcacaacccagtgaactgaggcttccagccggcaaaaacttagcgcctactccacaaggtatgaaaagtcttagatttgcttttggttttttttttttgtttgtttttggccctataacttcctgatgtgttccactgcctatcttttacaaattatacaagacctaacactgcttgtttaggattcactcccgcttcatttccttgggtatcagccgaacgctgcgccgaacgtcttgaatcatctcagtcaaatactatgttatttgatgttcgcccatttgctcacttcagacaggccaatatcaaaggatcactcaatttatgcattcccactaccctactcaagcgtcgatcatttgatacccagaaattagagggaactttcacagacgacgccgataaacagaatttcgctcgttggagaaagtgtgacgtgatcattatctacgattctgccgcagcggagttgaaggacgcagcacctcttctgaaccttctcaataaatttcaggctgaaggctggaaaggagatgggttgatcttacaaaacgggtttcgaggtttctcgggtcggtttccacatttgattcagcagccacagacacagacgactggatcatcctctaaacgcccctctcccatgagaatcaacctgcaatctgttgctcctgtcgtgggtggttgcgccctaccagaatcatcctctgccgtcaatccattctttggaaatattcgacagaacatggacctccttggaggtgtcggacaaattcctctgaagcagcccgatcaattgaccgaagcaaagcgacagcaactcccttcctggttgcggggcgcttccgatactaaggaccaagggcacattgtttcgaacaaattcttggttttggagaaaacggaactggaacgcatgaaacaggctttaacatatgaaggaccttcaggtgacaccaatggtagccccaagaaatatcgcgtcgcgggaatagagaaaggcacgaagaatcgttacaatgatatttacccatttgatcattctcgtgtccggctcgagggaattccagctggtgcctgtgattatgtgaatgcgaaccatatttctgctgaacttaccaatcggaaatatatcgccactcaggctcccgttcctgatacatttgatgtgagtagcagttcctcacaatgcttgttatcatattgctcacaatatccaggacttttggcgcgtggtgtgggagcaagatgttagagttctcgtttccctcactgcagaggttgagcgaggacaggtgaaatgccatcgatactgggagtctggaaaatatggaccatttgaggtaaaggcctattcggaaaaacatatctacatcgaacccagagttggcagtcccatgccgtcgaccgaacggcctgatggcacaaacgaaaatccagtgatcaccgtgcgaaacttcagtatctgccatacgtcattcccttttgagccgcttcgagatatcacccagctccaatatccttattggcccgatttcggaacaacgtcacagcctacccatcttctccgcctcattgagcaatgtaacaaggtcattcgtgccactagcaaccccagctttagtagtgagcaagcggaaccaaagggtcagcggccggtactagtgcattgcagtgcggggtgcgggcgtacggggaccttttgtactgtcgatagtgtcttggacatgttgaaacgacaacgtgcgcaggctgctggtggtggaggcctggatcaaaatcctagcggatcttccgagtggatgggggatttcactcttgacctaattgcaaagacggttgaggatttccggagacaaagaccgagcatggtgcaaaacctgagtcaatatgcactctgctatgaaagcgtgcttgaatggctcgcttctgagatggactagaacaagtccttggacttttcttcttcttcttcttcttcttcttcttcttcttcttcttcttcttcttttctcttgctatgatgacgaccctgggatacccctttctggccttgcattattaccagggccatggttttcttttgatctatgtacaatgtcatacagctagtggttctgcattttctggtgtttgggattgctttgggacaggggggaaaatggacacagctaattttcttgggtcttattgcgcataagagacaatggtagcgtcctagtctgatgatattcaagaattgcgctatttcggttacaatccactgctttgaagagggcttataaccacagttcaacagcctgactttcatatcctgggcaacagaagtttatcaagctctttgtcggagttgtttatgtactattgtaatgcccctagcgtttgacgggccgcttgccttttccactataaccgatattcaggaacatcactccgcgatcagtaatcgcaaccagctcgtcctcattttcagtgaaccgcaattgagagcaaacggcctctaaatgaaggacaactggtcgcaagtcgatggcacctgtagacgattcccacgatgatggataaaagccggtgctgttctcttcaatcaattccgacggattcaatgcccagacatagagggttttccagttagcgacagcaacacgagttccgcgacgcgaagttgctaccggagatccatgcgaagttgttacttcccggaatcccccaagctgcgccacaatctgccaattttcaaagcgccttccgcggtcaagattcaaaacatgggtacaccgcggaccagtgtatgattcagacttgagtagacatgccgcagtccatttttcaacgcggtgggtggcaatgccgaaggcaaggtactgccaatgacagtgttccccccggtttatatcgccgagctcatgagtaccgaagaatggtattccaattgagaattgaagcgagagggaagacgaaaactgcacggtgcatgcattcttactaacatgcggctttggctcgcctgggggggcagggatgcgatcaagtctctgaaaggcaccgtatatgttttgagctcggtagtggtagagcaactgaaagcctcgatcattgaaagccaatttcattacgggccctagtccccgcgaagaacggacatgtgggtcttgatcgttggagcttgtcagaacgtaagcctcaaaaccagcatctagagatgtcagaaaccagttctaatatgacagaatgacgaaacgaacaagtgattttacagggattgtctcccttacttccttctgtgatgccttcgctagaatcgtcttcatcttcgtcgtcatcgtcatcgtcatcgtcgtagatttcggtataaagaaccacgtcatgatcaaaggggtcgagcgtgttttgccatgatattgcaaatttgtcgttggagacggacaaagccagtggcttataatctcggcattcgggaaagtcatacaatcgaatggtgtttgccctggaattcaagcgatggttggccaggtgaatactcccgttggggcaagacttgagggcgtgtttaacaaatgggtggtctgtatccagctcttggtctaagaatggtctgaatcggtgaaggacgtagactccaccgttttcaccaaaggcagtctggaggatttcaacctccccaagatcctgtcctggggatttcaatttgacttcggtccgatccccatcgctcatgtcaatcagatggacggtgctatgccctttaaagacaagtagtactcgaatgctgtcttctgatgcctcaattgtcgatgcatggtagtcaatcactcgattttgatactcataggtggggttggcgtaatgctctgccccatctaactgttcatacgagcgcctcattaactcatcaaacagatgcctagtctgataagcttcaatcccatcgttccaaccaggagtattatgcagctgatgaatgatgacttctcggctgctggaagcaatctcataaagcctgcggcttgaaaaggctgcctggaagtaggctggtgtgttgcagctccgaagaaccagttgtaccaactctgtgggaagttggagcagcatatttgaggtataatattgccctaggtctaacatgagggtttagcatatacttatagagcttctgtcaaggcacggtgcacagactttttgttgcctcgtgggtctaggtagcagcgccaggtatggaacaggcagaaggggagaaaatgatgaaatgaggaaagacaggaaagataaagacagaaacccttggaagacaaaaaggtcgagaattcaaggtatcactagcggtttcagctgtttacccgtcatacttctgaaatatgatattttgtcttttctctccgccttgtatatatatactagtacacaggccccctgcaggtccaactacggggtgtaatatacaagaatacacgaatctttatgattggcttaagatttcagccgaaactggccttcgcaagacatgtagccagataagtctatgacttggatggacttctagttgaaattgtgtcttcgcaaatagcaggctggcctgttcaaaagaataacggcccacaaagcatagttccatccagttattatttcaatataggtaatatgatgaaagaccgaagctcactgtccttctccgccaccgcccgcggacatgctgaggaacatgaggattggaataacccaccagtacctagtttattgattagcgcacgaaagcaacgatagaagtatctgtaacctacttctgcaaaatagacttttcttcaggttgctctgggttttggccatcgggcccaacaatcactggcctgttcaggtgaggctgcgtcccggattcgttcgagacaagttcaatttgaggactcgatgttgagccctgagcgctagtagatgcagacagggagacagtgtagacttcgttggttgggccgagatgaagacgaaacgttggttgctcactggccgttaaagaggacaacgacacgagactgccaacccattgctttttgtttggggaggttgaagtgtagagaccaacacgcacgagattatcgcgctggtcatcttttggggggtgatatgagaccacgtccgatttcaatgaggttgggtcgtaggagatgctcgcgaggacggacggttgtggcgactctaagggccaatacaggatgtcggtcgagaaggaggcattggcgacagaaattaggagtaacacagcgctaaagatggtggataggaacctcatggcgaagaagtgaattatagtgaggagacaacctgagatgtcaacggtttggagaagaaagtccgagctccaaccccacgagtacataagctgtacataagctgtacataactatacatgactatacataactagtcatacagatgaatcccttacgatccttgctatatacatattcgaaattcaaagactaataaaatatatatatacgatatgtatacacgtaaatgttcttgtaaaaacataacataaaataggtaaatatcataattttacacttacctacttatatggtacatgaagagtacatcaatcaccgtataaaatagcgggacattcaagtattggtagagtgccccgaaagtgcaggtaccggctagtactgttccgtcagggcggcaaattaatgtggtcgtaagttcttctcctcacagttcaccttcaattctcttaattcaatatccacagatataaacagtaagtctgcttcgaccagtctatattccgtgttttgcgactcgctaatccatggttagtagcaatctatagctccatagctgtcaactcgaaagggaagagctactacggtaacatggcctcgcggaaggcatccaatgaccctcgggaggatctggcagttcatgtcgaccactatattggcattgatgtcggaactggcagtgcccgtgcctgtatcatcgacgacaaaggtgatattgtggggttggcctcagagaatatcggtctttggcaaccagagcacggtttctatgtgagtgcaactccaaggaatttgagtgccaaatcagtcttacctagcctctaggaacaatctacctccgatatctggcgttgcatttgtgtcgctgttcagcgcgttattagccagcacaatatcaatcctgacacggttcggggtatcgggtttgacgctacctgctccttgtcggttttctccaatgataccgacgagccgatctctgtaacgggccccaatttcgactcggaccgcaacgtgatcttgtggctggatcatcgcccagttgaggaagccgcgaagatcaatgctaccaaccacaacctactccgctatgtgggcggaaagatgtctattgaaatggagattcccaaggttctttggctcaaaaaccacatgcctaaggagctctttggcagatgcaagttctatgatctgggagatgctcttacacacattgctacgggcaatgagaagcgaagcttctgcagcgtagtctgcaagcagggatacgtgcctgttggtgtcgatgggagtgtcaagggatggcaagaagatttcttgcaggacattggcctgggtgacttgaccgaagataatttcaagcgtatgggcggagttgacggggtggtgagcctttccctaaatgacgatggcgcagtttactgacttttggtgccacacagaatggtgattatttaagtgccggtgaattggttggcactctctgcgatagggctgcagccgaattaggcctgccggctggtattgccattggcagtagtgtgatcgacgcctacgctggctggatcggtaccgtcggatccaaattcgacatgcacccaggccaatctagcgcagatgtccctaaacttgatatatcggaggccttctctcgcctcgcagctgtcgcgggaacctcaacatgtcaccttgccatgtcaccagacccggtttttgttgatggtgtctggggaccatatcgggataccattcttcccggatactggatggctgagggtggccaatctgccacaggagaattgctcaagcatgtaattgagactcacccggcattcaaccaggctatttcgattgccgagtcatcccatgccaacatctacgactacctggataagcatctcaaggagatggcacaagcccgaggaaccccatgtgtatcctatctcggacgccacttcttcttctatggtgcgtctgtcttcattgttagcattgtttaggttctggctgatttcgttgatgaattggggtttaggtgacctatggggaaacagatctccccttggcgatcctaacatgactggatccgtctttggcctaaccagtgataaatctgtggatggccttgccatttactactacgccaccatggagttcattgcgctgcaaactaagcagattgtagaaacaatgaacaaggcaggtcaccacatcacctctgtgttcatgtcgggctcacaatgccagaatgacatcctggtcaacctcatcgcatctgcctgcgatatgcctgtgctgattcccgagtacatccatgctgcggtatgccacggcgctgctatgctcggcgccaaggccgccagcgctgattcccagggcagaacccttgatctgtgggatatcatgaatcggatgagtaagcgttgcaagcaggtgttgccgacagaggataagaacgagaaagccttgctcggcgtgaagtatgaggtctttctagaacagtgctggaaacaacgaaaataccgtgggatggtggatgacgccgtgggggcctggaagtccaagtccacctaatttgatatcacgatcacgtcggttactctcttttcaatcacaaaaacgagaagatatggatactggagtgttagttcacgatttacaaatcgggtatacttgacatcagtcattaccgcatactaaaaagtatgacaatttcgaaatcataacataattattgcaaaatcatgcccaatgcatcgagctacagagcctatgtcatgaggaaagtcaagaacatgagtcacacactccatataaacgtcaagcatataaacaaaatcccgaaaaaacattaattcagacaagccaatgaatgccttgtgctgaaaagcaactatcactatgcaatatgtgcactttgtctagtaggccaccccgcctcttgttcggccaacagtgtagaacttgttggaactactggtgctgcctatggctagggtatcaaagcgatccacgcccatactgtccatattcacatagcctgacatatggaagccaagcacaacgacgaggtaggtgagtacaaggatggatcccttaaagtagttgctctttccttcgccgtatacatgcgagagaaggaagacgcacataataacggtaatcatatcccactgcgggaatattaggctgttgaaatattttgttagccacagcatttcgattggagacataatgaaaaaaaaaaaagaaaagaaaacgaaaaagctatcttacttgaatgagtggctgacaagctcagatgggtctagcgagcggccatagaaagcgctgaagaataccacagcaggaatctgcaatagacagacctgtagtgcataggcagacccaatttccatagataatgcaatgtttccgttcatggcaaatgagatggcgttctgttaggtgtgttagctaagaatatcaaatgcaaaatcacctcagatagggccttcaatgaccaacgtactaggaactccgtcgtatttggcaccaacgcgaaaagagtaatgccgaggaatttctcatcaatatccacgctctctagcacaacatcaaccgtgttgacaagaatttcagcaatcactgcatagaggacagttgccccaagaagaatgacagagcttttaactttgctccaattaggtgcatcatgtcctccgctagaatgagtgggctccacactcaacccgagatcttcaagctcttccccaggtgtatttcgtgatcgctccggagcagggcggctagattgacgaacagaggcttgatggtgttgtacattgggcttgcgacttcgagccgtatcccgagcagccactgttgctgctgttgctgctacttcggtgaactggcgtactagacgctcgttgtcttcttgggccatattacggacaaactttggcacagggtaaccgtcctcgccgctaggattggggggcaccaagtgtgggaaattgcccctgaggtctgcggcttcacttccagccccttcccaattgccagagtcattgtcctccaagccaagatgcttcaatgactggcctaagattcgcttatacagctgagattcacggatcgaatctttggacccagaagcggcaccagaagcttcgggctggccatttgggaacatgtgccgtggctcgtagaatgattcttgggcagattgggtggcatgggcatgggcatggggatgggaattctttttttcttccatctctgatgcccagataagagcagcgtgggtcctaagagtaaaccataggccgatgccgtatgaaaggaacaagaaaacagcggcgatccatgcatatggctgtaccgctttttgaaagaattgatcatcgacagccgctgtttgtgagaaatagcagcgcctgcaatctcgagtctctggatcgagggaacttacacacgagtggcagttcagctcatgctatgcaccagtcaacttaggttcgtttgcaaaggaaggtgaaacttacactaccataaacctgatagaagagggtgggaccaaaggcagcaataaccgcaaacaacaacatcgtcgaggtcacaccagctgatttcacattgaaccgttgggtcttgcgtttgagtgcaccaaagcacatggacaaaccagggaggaataaaatgccgacaaagatactgccgatgatacttccctcgacaagctgagccttgccctcagtcaaagcgacacagtagagatatacttctacgatagttgagaagaaagcattgatggcagcacctaagcccatagaagattgagcggagatcgaggcgacggcttgtccaatgaaataggccagaggaataatggagagcaacgcgagagggaagatcaaggccggatgtgtgagccaattctgcaagcctaagaatttgcccaaaacatggtagtcgaaaatcacaaacacaaccacgccaagaagattgatcaaaaagatgttcgttccatcgagagtgtacttccagtacctcgttccagcagctctgtaggtacaaagaagtatggaagacgaagatgtggttgtgctcgatctagcatatctggaatcggaatggaaggacagtgctagcggatgtctgcgcaaatggctcacgagtgtaatcgttatacgacccatgggaatccaaaacaccaagagccagcagacgagcgataccataagcatcagcggaccaactaggaagtagaagaacacgaagaacacgacgcgacccaaggtccattcgccccgcccaaagaggcgacgcttggattgagcgagctgagaggactcttcgcgttgtccacgctggggtcgcccgagcaggctgtcttgttcaccggctgaatcgacgctgtttcttcgtctaccgaccagggaccgatctctgcgagggccgaagaaaagacggccatgttccaggtcgccattctgccattgttcatattcgctgatactgcgtccctcgccttcatcttcctcggcataattctcctcggtctccagaagaacatatgatccgaacgggtataacagatatcgtgaaagacctgcaaatactcttccgtatgccacagcactggatgagtaggaaaaaaaaaagcaagcaactgcggctaacagagcgaaaagggcaagccaccatccaaaaaacaaagaccatagtaaattggtcaaaaaaagcatgggactgacatagcctcctggagaagagtggatatcaccctcggccgttttctctacagaacggcttttcttgtacaacgcaggcttccagagtctgataccaaacgggtgtgtttggttgatggcctgttgacggtctttgagtgtgaagctctcagcatcgctggctgcgtcttcatcgtcttctattccaccctcctcctcaccgtcctcactctcccctccactggtatgtccggtttgtttcaacgaaggaaactcttcttcataatccagacctgcttcaggtaaggccgtttcgtctgcgttgtaaccctccgaatcggctcttgccaagggtctgggacgagcactgggacgtcgtctcaaggtcgagctttgcgttcgtagtgggcgaatcctgggtgattgttgcgggttcgcgccttgcttcatcgtcatatattgcttgacctcattgacatcatcatctgtcgagaacccttgccctctgtgggggattggacgtttggaagacatgcgacgcgataccgagggctttcggggcttatcagggacagtagaagattgagtcgtgaatgcgcgagtcaaactctcgtcttggccatcatcatttagttcaggattggtcgcctcggaggaggatggatcgagtgtacctgcaattttggatcaacccaagccgtcattgttgtaggttacaccaaaggcaagcttaccgtatgttctccgcgcggaggcagaggatctgattggaggcacagcttcaggagttggtgtttccattcccgccatcgcagatggctgcgtggactcgggagagccagggtttcctttatcgccagccatgacccagtgatttgacaagcacacagtgaaccttggaggcacaagaaacgagtaagagagataaattcaaaaagacacggggtctcttctctcttttatgctgtctttgttatccccagagaaagagacagaaaaaagtcaaagcgataagaccggagttcccagtgacattattgaaccaaagagatctaggtgaaacgcagaaatcgagaatgtcaatgaaagcttcattagagatgcatataagtcattgcagtatcagggaggacgaaactcgtggaaaagagtatgccgaaggggagaaatggctctttgaccgttgccttctcttgcagatgacccggtcatcagcccacctaagcagctccaaggcttgaccgcccaataagatccacagctgactcattgggcggggagctcccgaagtctcatccatggaaacaaagcaggatgtttgactggtttgtcttaaataattagcctgatatttcaggattgaattcctttttgttaactagttaacttaactaactaatctcttagtcagcacaactgaacgggcactgggcctgagcttcgcgtacagctggactgctctgctcgccaaaccccagcttcaacttatccgtttctgtttccgagctacatcccctcctctgacgaattctcaatacaccatcgtctgagcagaaagataaaggcttttttttcttcactgcaactgtgttctgtggaagacagacagcccttgactctccatagcgtcatcatcccattcgccatcatggctttagacaactactatcgcaacaaaatcgagggcatgaagcttgagattatccaaggccaggctgttctacgacgattagaagcgcagcgcaatgactacaactcgagagtccgtctactgcgcgaagagcttggcttgttgcaacaacccggctcttacgttggcgaggtggtgaaggtgatgagcaccaagaaggtcttggtgaaggtacacccagaaggaaaatacggtaggcttcgtccattctatcttggctttcaatgaccgggcttatgctaacggtatggttttctttcatcgcagtggtggatatctccgatggtgtggacattagcaaactcgttgtgggcaagcgggttgctctactgtctgactcgtacaagctggagaagatgttgccgtcctcggtcgatcctctggttgcgctcatgatggtcgagaaggtccccgacagcacttacgacatgattggtggcctagaccagcaaatcaaggaaatcaaagaagtgatcgagcttggcctcaagcaccccgagctcttcgaatccctgggtatcgcacagccgaagggtgtcttgctctacggcccacctggaaccggcaagaccctgcttgctcgagcagccgctcaccataccgactgtcgattcatccgagtgagtggttcagaactggtgcagaaatacatcggagagggtagtcggatggtacgtgagcttttcgtcatggcacgagagcacgcaccaagtatcatctttatggatgagattgacagtattggatcaagtcggatagattcatcaggaggcggtgactcggaagtgcaacgtaccatgttggagttgttgaatcagttggacggcttcgagccaacgaagaacattaagattatcatggcgacaaatcgactggatattctcgacccggccctacttcggcctgggcgaattgatcgaaagatcgagttcccccctccatcgtcagtctttccctcccctcgcccctactccgccccagttatttatggcttgttctttttttttttttctctttttcattcctttggccttgagcacgatgctaacttaactcttctttagggtcgaagcccgtgccgacatcttgcgaattcactctcggtcgatgaacctgacccgtggaatcaacctggccaagattgccgaaaagatgaacgggtgctctggagccgagctcaagggtgtctgcacagaggcaggcatgtatgcactccgcgaacgtcgggttcatgtcacacaagaggacttcgacttggccactgccaagattctgaacaagcacgatgacaaggaggtggccgtgtcgaagctgtggaaatagaggcctctccaaagcggggggtggatcccgggggcctgggaaacgatcgacgacattgtatcactagttctaatcctaccctgataattcagaccccaagtgaatccatagttgtgcgacatgtctggatccgacctatttcgggtgatgtgtaaaggtgtaactatcccttggcaaccttttcgggggcgactgcctgcttggcctcggtgcataccctccgtccacatacatgtagtagaacagccatctatctcgtactggatatggggtcggtctgatgtgcaaggagaccccggaagtagatctacgtaacgttgattggttattttcccgactggcgaaggaaaaggaggcttggcagcttcagtctatctaaaatggcacctgaaggcagtggcttactttgtaccagtacggagatgtggtacaccatgcctccttgagtgaaggcttggcatattgctgcggaccgtgtagatcagagatatctcaattggccttggcgcggtattcagggatctctgactattgtcttggcagtttaaaccccatcttcggtatatgtgggaatgtccacaccgagcgtagtagtatacatcgggtaatatcgactattaaaatcattggacgcatttctccccttgccggtttagactgacgcggaattgcgcgtgaccaaccggcggatcaacgcctgggctagcgccaaggtattttccaacctgggaaggttggactgctgaggtaaccccccttgtcctagataccggatccacttaggttcaccccatactttgatgaagtatccaggactacttcttgtgaacccgcccttgcgcagccaagacatgattgtaggttagaatagtctgaatagagagaatcctggagtgagattgtacccttggatgttttatatacatgaataactctgtatttctgaatttggttctgacaaagtcattgaccgagagtccgtttacggtttggttcgggcgttatctctttactcaattgaattagaatataaatcttgcaactaaccagaactggttagtccactaactaagataggtcaattatatattaatatttccaaaaaaagcaatcttcctcctctccacgtctccacatctccacaactccattggctctatacttctccgtactcttatgtactttgtacttggtatttctttggtttttcggtttttcttttccctttttcaatatttgactcaggaatgatcagacaactccacgattgtatttatccgaatccccggttcatttaaactatttccattccccccttcttccccaccttttctatactttcctaagcttgactttgaaatttccattcgcctagcactataattcaaccggactatgtccgatctgtggtattctatagcctttgccattgaccctaagagaacggaagccatgcctgccgtcttacagtcaacaatcaatttgctggaaagtgagctggtcaaagcccgcgctgccctccgggatatccaacccaatgcttcaccctttggattccggagtgatgaagtcgcggtaggcgccatgactgcctacagacgggatctcatcggccgcgcccccgatttttacggatctcgccgcttgacgctgaaggaactcggcctggagcccgtcgtacgcgaactacccaccgaacgagtggtaccaagggtgcaatgtataacacccgcaccgcctcatcgaacaggactagaggatgtcctgagcaatagcttaatcctcgaccacatggcaccatatctatcagtgtcctcgttgatgacgctgtgctcaacttcgcgccgcctacacaccatgatcactcagacaccatatgtattccggcatctcgatctgtcccactgtcggggcgcagaactctctacagtaacacaagcggagaacgactctcagacggaggacgagatctactccgctccagtgaagaatatctttacgagccttgagcgcagaggtatactgcaagatgtgcgcactctcatcttggacggggtgtcagtgccggctgacctggtggccgatatcattctgacggatcgctttaacgtcaacatcctgtctatccgcgaatgtcgccatctcaacgaacgcaagctcatgcaggtccttcagcatgccgttcggcctacacgtcctgccggtatgccacgagtgaagggaatctaccatttttctcccatgcatacgggacctcgggcagtgacacgaccccgataccgtaactcgtggggaacccgtgtgggaactttgcggacatccagccaaatcccatctaactccgatcaggaggatgaggtctccgcagaatcctcgatagagcagcaacacgagtggtatagcgcatcggggaagctattcaagcacactcctgaggaaggctgggcccaagtacttaaaaaatgtgagggcatcattgcctttgatgctgctctttgtcgtggcccgagacacgatctcaatctatacagttcgaccacggaggcgggcaccccagctgcggttccattgctcggacccgccgtggccaccgtagccctcggaccccgtgggtgtgacggatgccacagttcccccgaaggtccgtctatttggagccagtccccagatattcaatttccattgcttggccccccgccattgcattcatctagcgttgccatggcgaaacggcccgagctaattccaggagagcatccggttctcattgcccgctgcacagactgcctcaccaactgttggtgccaccggtgcaataaatggttctgtgaaaactgtctaccaaacccgcagcgcgttcgagtaagcctatccccgcatcagactgcagtccacgccagtgccgctgagctgcaagaacgtgaggtgtgttgatattgaatcttccctgctaatcgtccatatcactgattcttgtcatgcagagattggaacgaggtgtaagcaaagactgctgggaatgtggcccaactgtgagtaactccccggatctaggatgtcacttttttttctgaccatagtagtgtgcttcctgtaagctggaatgccagcacacgtgccaaggctgccagggcgattattgcattcagcacaatgaaggatgctcgaagacactggtacgtagtaaccgaaggccctataattgcatgagagcgtatactaaccttgtcccagtgtgactggtgcaataccagtgctcgcggtcgaatgcgtggcgacttctactaaatttaatttcgtgattttaaatatattggtaatcgacacgtcgaattatcgcgtatgtacggagtacgttgacctgattttcaagcgaactatgaagcgtggaggcttccagaattgaaactcttatctcttatcggctgtgcagaccgcaatagtgacagattttggcagaacttggcttttctcgggcagaattgtagatatatatatatatatacttgaggttgaagataaatacaaagccttgaaacccgtgatttgtatgattcattaagaaaacatacagaagagaggtaatatctatctctatacagtaggcggagagaaaagcggtggtcctaaagtattagaattgacttttgccaccttcgccgctattgcggtccgtttccgccgcattggaatattcatataaaggatgcatcccctctctaatgattgtcaaattctatcatggcccaagatactctagcctggtcatcccagcttttcgtcgcacctccagagcgggcgcctcggctaactggcgacaaaatcactctaccgcaatctgcgcttgaacagctactggctgccgctccgctccaagctgtcccctcagggaattctcgtgtacttacttcgtcatttgaccctttcaatcaccataccctcgccgtcgaatcgcgcgcccgtcaagcggccgagcaacatcagcagcaactcccccacccgttaatcttccgcattgtcaatcctctgaatgggcggttcatctatgcgggcattcgggagttctccgcagaagagaatgaagtcgtactgagtacattgctcagagacgcacttgatatcaaggatgaagagtccttgagcgaaaatggcggatcacaagacctagcggtgcaaatagaaagggaaccctcaccacggactggccccgcggtcacagtacacgcgaagcaactacccaagggcacctatgttcgcctccgtccgctagaggctggatatgatccagaagactggaaggctcttctggaaagatacttacgggataactttacaactctcacgacgggcgaacttctgacggtgccgggtacccggagcgagtcattcagatttttggtggataaagtgtttcccgaaggcgaaggaatatgcgtggtggacacggatcttgaagttgacatcgtcgcattgtcagaggaacaggcccgagaaacactacagaagagattggaaaagtcctcacgcgcgccaggcacaactagtggcagttcgatcggcggtatcctcagcattggggaagatgtcactgcccaagtattgcctggggaatatgtggattatgagcttcgagattggaatcgccaggatactatccagattgagcttactacggacaacccgggattgagtcttttcgctagtcccttttctactcgccaaagaagccgtcctagatcagatatgcatgtcttgggggacttctcgacccagtcgcccaagaaattcgatctccggcctacgaacatggttctagaagacgccgaggctctctatatagcagtccacgctgatcctgcggatcagagtgaatcatctgatccacagcggcagtcaccgtcgcaatatcacctgcggatcagagtgaatccttttgattctttggtcagtcataatgggacggaagagtcccacgagcctggcgatgtgcagtgcaagaactgccagcaatgggttcctggacggacactacttctccacgagaacttctgtctccgcaataacatattatgcccgcagtgccagaacgtctttcaaaagcgatctttagagtggcaaggccactggcactgtccacacgactctggttatggcaatgatgccccaagcaaagaaaaacatgacgctatcttccaccaaacacacaaatgcatcgactgtgctggggattttgagggacttcctagtcttgcgcaacatcgtactacagattgtcctgggaagttgattctttgtcaattctgccatcttctcgtgccacagaaagccgattctgaccctgatttacacgaccccgaggtgatgctctccggccttactccacacgaactggtggatggaggacgcaccaccgagtgccacctgtgtaataagattatccgattacgtgacatgaacacccatcttcgccaccatgacttggagcgcctttctcgacccgcaccgcgcatgtgcatgaacaaaaactgcggcaggacattgaataaagccggaaatgagtctgttgggctgtgcaatttctgtttcggaccgctgtatgtggatacgcacgacccagagggcaaagcattacgtcgtcgcattgaacgccgatatctctcccaaatgatgaccggatgtggcaagccctggtgtcaaaatgagtattgcaaaacggcaaagcagaaagcggcatctgactctggtcctccagccgcgatgagtgtggtggaaattatgaagttgacacgcccacttgtcgaagctctcaacacccagccggatgtgcctaacatgtcgcttttgtacctctgtgctgatgaaacaagtcaacaccgtcgcaatcttgcagaattgattgcagcagagagcgttgaagggaatgacaaagtctatgatctaccatggtgtattgcagcagccgaagccgcgggtggcgacttggaaaaggcgagagagtggctgtctaagtgggcaccaaatcagggcgcaacgagtacatgatccgtctagttgttgatttagacttgattgggtatgagaatatgggcttggttgatcaagttgagcagatacaaggatttaataatgcataatgaatgatatataaacacagctagaattccataatattcatgattaaaatgcaaaggctggtctagaattgagatcatagacatcgcagccactagcctaaaggaccatacatgcaacgcatagacagagaacatgtatcaatcgaaacccaaccctttcaagctgcacctgtcttcgcggcgagcgagccggtgccgcgcgaagagaagatacccataattccaaaaacgacatagaacagagccaatggatacgccacgagacccctcatgccactcatacgcgccacagcgcaaaacattcccgatgaactgtatgtacaccagccaacagcggcaacggtcaggagatagccgaacatggtatccatgggaatcatgatgccaatgagactggtaagcaccaaaggaaggaagcagtagcccaacacgctagcggagcgcgggaaggtcagagtagcagagaaatggcccgcggccgaggcaccagacatggagggtttgtggtggggattgtagttggtagggtcggcggcgtttggagttggagcggtgtcgagagcgggagacatgaggctgaggatcagatgcaaagcgacggtaccgaaaacggcgacgccgtagatatagccgtagaataccttgcctgagaggaggaggaaagtgccgtacaagacgatgtagagcagagctccgtagagatcgctatcatccataaggtgattatcgatagaggcgaagggattcagaacagtcagtgtctagacaatgaaaccgttagcacccaatatcgggcattcacattgaccagaactacaattaaattaaacccggggtaaaaaaacaagccacccgcaagaccgggaccccgcgtctcctgaaagcgcctgatataagaatcaaccaagactaaccttggtccggatatgttcaaagttgacacccaactcctcaagcaacggcggttcaccatcatacccctccgtcccaaatgcagctaaccagcccgtccttaagccgccctgttcgcccatccgtccactaacgccagcggctgcggacccgaatcccccatacccactaccggcagggtaagcttgtgtggagggattgggagctccaccaaagccggcaccatatgatgcttgtgatggggttgtgtgaccggaaaccgaggagtaggacgaggggaagaactggagattctgtggtgcggagccctgaggggcgtagccctgctgttgtggatagtattgggccatgaccacgactgacggcgtgaagagcgaaaggtggctagtttctgttcgagtgtaggacgtgcttgggatatctggagagtagcgacaggttaatgtgtggattgttgtagagcttcgaagctccaaatggcctcaataatgttggatgactaagcgactagtcgcccgcggcccagggcccagggcccagtgtaaatgtagggtagagaaatgtctttctttctggatttagaatgtccaacgtttatctgaatttgattggaattggtaaagcaatgtgaaaggtatggttgaatctgcggaaaatctacttggtaatgtttacaggaaattgataccgatgcccagctggagccctttgcggccttcttcaccctttcgcaatgccagaggtaaggaaaagttaagctcgaagcgagcgacaggatgagcgtaaacgataccgaagccagctgcgacactgggcagtccgctttgtagttcagagagtgttgagaccagagcatcctgcacctcaccattagtagtaggagtggctttctgtgaagtctgcagagaaagcaagcggccaccgttcaagaacgcctggaaccgcacgggcttctcagccccaagtcggggaagcgggaacagcagattggcgcttccggcggcgtacacatcaccgcctagggaatcaacgccttcacgaggaccgagaccgcagaggcggaatccacggacgtcagtaggtcctccaagctggaagcggtcattgacacgggacagttgagggcgagggttggactctagtccaagagggtagataagaccagcacggaatccggtggtgaggctaacgccgctgtcacccttaattcctgggatgggaatagggatggcaccttgtgtctcaatttccgacttccagaaagatacatcgcccttcagcgggccaaatccagccagctcattgaaggccttggcatagtacccacgagatggcagcaaggcattgtcccgctggtcgttaacccagctatggaagatgctgctcttcacgctgtcacctgcatctgcgcggacagtaggtgaggcgttctccgcaaggccagtgagctgtctccagaaaccggtgtatccaaattcgtgatggtggcctgatttggacatccatcggagcttactccaaccacccttgagaacctcctcgtgactcgcccaagacttctgtgtggaacttgcaataccgccaatttctaggcggaaatcgggatcacctaagatcggggtctcgaatgcagcctggtaagcggaccgtgtccgggtaccgagcgaagcgttcaaatttaaagtctcggcaccaccaaagacattgcgccagagaagattaccgtaggctgaaccttcagcattgcccaagtctgttccagtcttcatcagcacacgggacttctctcgcgtcgccagatggacatcgatgttgcgcatgccattttggccttgcgactcatccaagtagaccgaaataggctggtggaatagatctgagatgatgttagtagatacccatcatcattgctattatcccatcgtctcataccgaaacgtccaagtttatctgcggtagccgacacttcccgcaacgcctcagacagtgtatagggccgacccttgtttgcactcaaaagggggctcaagttgcgctcaaggaagcttcgtctggtatgaggagcactggtgacttgaacagaagagatggtgcagggcagggtcgaattttcgtcgatctaataaatattgcgatcagccgggaactccgcaagtaaacgcgaattggctgtcatcggcttctagatgtgaagaccataccaattcagcgagtcgatcctgagccttttggtaaatggcttgcatgcgctcattcacggcctgctgttgctcttccaacaccttagggtctgctcgctgttgcaaacgttcgaagatctagaagcggatagaagtcaatagagggtcaactgagcatttaggcagttcatgagctgcctaaggtatgcactgacgctatcatctccggcagcaaaagaggaagacatttttgcggctgcaatggccagaactttcggcctccggggaatagatcgggggtgcgtgccaaacccgcaagatatggaaccagcacgtgacctggcgaacgtgagcgcctgattgcgacaatctatcttctgactccgcaacttctttcactgttcattttatttcctgggactcgctttcccagtactcataaacaccgacttgtcttattctacttcgcaaactttattgcttctgctatcgcttctgctccaatcactaaagatggcgacaaaagcggctttcaaacgggtaagtggccagacctaaggtcaatcggttatccgtgaatcgtgtctaattattatagctcactcgtgaataccaaaatatccaaaaagatcccacgccatatattgtgacccacccatctgagactaatatccttgagtaagtgatatacaccccctcgagctaccgcagaacctcgaagctaacctgctccagatggcattatatcctcactggacctccggggactccttatgaaaacggacagtactggggtacactgatattccctccagagtacccattcgctccccccgccattcgcatgcacacacccagtggtcgattccagccttccactcgactctgtctaagcattagtgatttccacccgaaatcattcaaccccgcctgggaagtttcgactattctcatcggtcttctctctttcatgaccagtgaagaaatgaccacaggaagtgtcagtggttcggaaagtgagcgcagagtgcttgccgcacgatctcggtggtggaactcgaccggaggaggttctcatgtcagcgccactgccggtgtcactcgaacttccaaaggtatcaacaatgtcaaggcgggagatggaggcttaaagttccgcacagaatggaccgaactcgaccaggaaaattgggcttggatgaaagagcatcgcatcgattctgccaccggtcagattttaccggatcccgacgcgcccaccaagtgttctccagagacaagtgctttacgtcgacgtcccaacggtagtgctcctggaattggttccgtcgtggatggtggaaatgtcgcgagagaggctggtcaaggctgggccagacgaaaccgaatctggatatgtgttgctgtcttctttggctatgcgttgatctcgcgactattgagtgatatgcgagtatgagactgaaatagtttcttcatgttgaataccctttcctttgtcttcatgtcttatcctcgcctttccttctttgtccttagcgggttgcaagcattatttgggcgtcatggggttttttttctcagattctccaagattctccaagtccaagacaataaagtccaattattgaatacccgaagaccatttgattccgagtatataggttacaccgttgagcaccggatcatcccagacgagcgctgagttgggcttgtgctcgcccccgcattggcaacgtaactacgctccttttctcttctaaatccgccttcatccaactgcatagcctgttatccacttcgttattggtttgtcttctgtgttttacctcttttttctttgcattccgaacttggctcttcggatggatcatctgcagcctttcacctttggttctacccattcaggtcagtgcatctctagttgatatacctgatattagggaatctggccttattgaactctgaatcccgttcgcttctttttgcctctgttgcctcgtttgcctccttcgaggtcaacttcccgtcaattttgagtgatattgctctttgtttcctatttgtctggttatggacttccccatcagtcagcagtgttagagttgcagcaaagagatccccctcgatcatcaagagcttggactgaaatccccccactagaacccaaggctaaacctgcgccgctggatcggccttcttttacattcatcgatcacgacgatgacttgacctccaaaaggattaaagatgtcaatgcacgcaaggctattcgttcccatgttatgcgcgatgtacgccgacgggagagacttgctgggttgaagcgaacatccagacagaatcgcgggcaatccaatgcttccaaggctaccattaatgaatcagatgaacaaagactggtgctgagggcttcatctcagtcctccgcttcgtcttccatactggatacagactccggagacggttttacgtcaatttaccgtgggcgtcctgtcaggtggtgtgctggttatcctttgcctctccattcaaatcccaacccacctacatcatggtttcttgatcctttctttacgttgcccggtactagtgagcttccttcgatggttgcacacttggtgtactactgtaagtattactcattcaaccttgtctatcctagtcgttctaggtgttcataccgcatgagcctccccagaactagagctgaccacatggcgaagggaaaaccatattcgtaccgatgacttttccgaacacgagcaaagattcaaagcaagagatggaactaatggttagatcctcattctctgacccgggaagtttctttgggctgatgagcatgtgcgctgcacatcgagccgttctcgcgagccagcgatcgggcaattgggactcggtgcttaccaacgaccctgactattgtatgatgagagcaaagtccattcaagagatgagcgcaaaagtacgggatccgaatcgcagactcagcaatgaggcatttgataccatagtcaacctcctcactggctcggtatggattctattcgtgacttcggattgcagtgttgctaacagtccacagctaattatcggagagttcagcgaggtccatactcacctaacagggcttaaaagtatggtcgacctgcggggtggaataacagatgagagtatccgttcctcctctatgttgtctgccatcatcacgtacgtgtgttttcggtccacctctttactaagctccgctcacggttgatgaaatagaaccgacatcaaagccgcgtcaggattgatgaccaaacctgttttcccattgacttgggatgcacagccaattccttcggagatccaacagcgaatcagaccactggcttcgtcccctctcaacagactaggcacgggattttctgtcaacacgtttctcagtcctcccttactgaaaattataagtgtgcttcgtgacatggtattctttagcatcacctatcagacaaatcccacggtcatcaaacctggcgaccaagactttttccgcatcctcaactgcgaaacagagcatcaacttctcagctatatctatgcagaaggttcccccaacccggagcccaatcttcatccgatcgaagcagtcactcgagtggctgctatttgttatctcaatcattttctgattgtctcgccttcatcatctggattgggtcgagcccttacgaaacacctcaaaacagcgttggatagctgcaaattgtctcttcttgtaggactgccaaagcaaaacttcggactgtacgtttgggcattatttatcggagcccaaggtgcccttggacagcctgagagacaatggtttgtggagcggctagcccgtgtcgcaatgatatgtggatggcagtcgtgggagcaaatttcaaaacttatggccgaatttttcttcgttacagctttggacagcttgaattggcgctctatctgggatgaagcaatgactggatttgtgatatccgagtcggaggaactggaattctcgtctcttcttggaacgggtgcactctcccttacttagctctcaattatgagcgcttgtatattttgcgctgcataatcaacatcaagtgtaataataaaccgaaagaaataacagaaagaaagtccgtgaagtagatatataaagatgaagtataaaattcaccgttttagactcggcctatcacgtggcacctttatgtcatcaaaaaagtccgctttctccggtcttttatcgcttttgctttcgtcttgaattttaccattcaatttcgttgcttcatacttcaaaatgggttggttctgggcagatactccgcaagctcctgcagtctcgatcccacatgcatcctcaaacgcatctcctccggttcgtttcccgcatactgtacagctttgatcatttagactgactcttatctaaagccgggatgcccgatgcatgaatccggctcgaagccctcagcctcgccagcacctgctgctgaactccctagcagctgccccatgaaatcgaaagactctccattctactctgctccaaaatcaacaccggcgcaaacaccgcagccacccgacaccgcggcgcagccctcaaccctttcgaagctcaatcctttgaactacatgttctcgtctatctctcaagagcgcgccgccaatcaaactgttgaccttcccgttgagcgcgaaggctcatcaattccaagaggcgacggcgaaggtaactgggagtatccgtctccgcaacaaatgtacaacgctatgttgcgcaaaggacacacagatacaccccaggatgcggtggagtcgatggttgcagtgcacaacttcctgaacgaaggtgcctgggacgaaatcgtgggatgggagcgcgtattcgccaagggactcaagtctggatgggagcactgccgccgcggcgaggaaaacctgagcatggacctgacctatgcagacgagaatggtaaattcgattcgacccccgagcctcgtctgctccggttccagggtcggccgcaagagtggtcaccgaaggcacagatataccagatactgagctgggcgtacccaagcaagtttcagtaaggactgtcctcgcgatatttacaataggcaaaattctgactccacttccaacaggacaagccctccatttgaccgtcacgattggtatgtcgtccgccagacaccttcaggcccgaaggaagttcgatacgtgatcgattactactctggggatccagatcctcacggactgcctgtcttccaccttgatatccgccctgcgttagatacaccgaccgccgctgttgagcgcctaatgaggtggggaggtgacgtctggtggagggctagcggtgcagctgttcgtgaacagacctcgcgctaagagtgtttgacagctgcaacaaccaggctgtctgcttctccactccactctgtaattattcaaaggcatggcgctggcgttccattgtttatcttcgcttgtccttgtacgatgtttatcttccctcttgtgttatatcgcaacctccgttagtctttggaaatagacacatgataatgatatctttgcattaattttacttccgcttccccaaagatcagaagtttcacgttttggtagcagatttctttaaaaaaaagtaagtgtatttctctaaaatccaccgagtatggctgcgctttcatcattcaacgggcatcccatctaagctttcatatcaacagtgaagaattgggtgtgtatggtacaaaataagaacggtggatggtcttatatattaggggaaagttggtcgtacttgacgcaatgctcaacactctcgatgctggcctgcagcattccacgagcctccaggccgacccaaacccagagcattgagtagtcgcccgagcgcacagtttccaagaatgaacggccagaccccaattgtcgtagaataggaagtgcactagacaaagtcagcttcagttgaacaagtagaaagcctcgtggaagagaaaactcacctcttaaacaggtctagattggggttcaaactacgtcctattccttcaagcagaagacatgaaatgacgacgttgacaaaatctccttcaaaccgaacatggtgtccgcggaccatagtcaatacctcactaaggatatcaccaatcttgacactccccagagcgaaggttcgagacttgatactcagaaccaaatgctgcattttcagtgcaaatacctccgggtcaatgacatcttccggtgttcggcaccgctcgaccataagctgaccagcccggtatccgtcgaattcagcaatagctcgaaagaggtccaggaagttccgtcggttggtctcatttagctgggtgacaagaccagtgtcgataaatatcaactgcggacgatacccctcgtcgttgagctgggaaagagcagccttccagtcctccgggtcattgagatgcggacgtaaccgcttgaggactgcctctgtcacatcaacttcggcccgtgtcggggcatcgaacgcacgcgaatgcttgcgaagggagaggtctagctcgctaggcctgtagaaacgaaccatgatgttccccggatggagatcggcatggataaaattgtctatgagcagcatatgcaaaaatgcatcgaggccttcattagcaatctcgtgctgatatagaccccctccaatatccaagaaggtggccaacggaatgccctgggcaaattcctcaaccaacacctcacgggtggtgtattctaagtatgggtatgggaaccaagcagtagtgcgagaattgaacttctggcggaatatgacgagattggcggcttcaattcgaaggtctagttgtagtttcatcatttcaccaaactgttgtacttcgtcggggaaagaaagccagtgcatcgtggggatgacattgatcatgtgagcaaaaaatgacatgatccgcaggtctctatggatcatttgatcaacactggggtgctgcaccttgatcgcaacatacgatgatggcacccgctgcggggagctcttgactagcacgtcgacattttttcgaaccttctcgcccagtgtttgtggttcgattcccagttcttcttcattggttgcagcaaggttcggtttcaacttcgccttatagacctgtgcaatcgcaccaacgcccagcggttcctcctggaactcttcgaatatgtcctcgaatggcagtccgttgaatgctttgcagataatacgcttcgtttggtaaagtgagtgggcgggggcatttgagtgaagtgacgacattatgttgcacatttccggtgggaagatatctgtccgtgaagcagcccattggccgagctattcaagaagtcagcttgtaagttccgtctcaatggacagttattagccaaccaaacgtaccttgataaacgcaggaccggcccgttccattgccttgaccaagaaccgataccaccacaatgtgccagaccgcgcgccatcccggccctgcactttgcgaccaagccagatggcaggcaccgtggcgacgaccggaatgaatatgatggcaaggtgcacgaatcggatccctgtagcaatagggtcatagacatagcaataaaaatagacccatgctgtctgacagagcttcgaaaaaccttgcgcgtcgggtgagaccatcttccgtacctcctcgcgcgaagcctccagcatctgcatttccgcggtcttatcgtggccatcattctctgccgccagtttcaaaaaggccgctggtgccagagtggccatgagcaccccacctattacgggagccctccgcggggtgccttttagttgccgaggccatagcggacgactgaaatattgtcgggggagacgcggaagcccgcgtttgagacagaaacggccgaagagaccggccgccctcatgttatcatgcaggcgtataatattaacatagaatcacgaagttagtagaaaggtcgaggtagaagtaacgagtagccttggagtagaattcctagtcaagatcctggacgataaacaccgtgctgcgacgtcattatatgagcgcgggtagataaaaaggacaaacataacaaacataacaaacatagcaaacaagacaaatcccatcatgtgagcatatacatatcacctgtacagtactcggtacataagttataacctagctaatgataaaagtaaccctaactgctcattgcaggctctagttaatcttctaaagtggtggtcgaaatttgcattctgcaacaacattcctcgtcttttgtccgcttgcaattaaccattgccgaatccggcaatgtccactgcagatcctagctctttatcaaggagaaacagttgaggggtagatcttgctttatagcggtttctattagtgactgctatgattttcatgtcccgaaaacggatcctcgagccctattcaaacggccggaaaaatggtcttgtttgacattaaatcgggccatgatgcccagagatccagagaggctttttcattatcttcagtgtctcaaacgattgccagatggagcgggagttgttgaccatgagtcgtacccagaaccttcgcgatattgagtcgaacaatgagaaaaagcactcgcactggcgcgattgggcctttgtccttctgtggggtgctactggctatgcgtgcatcattttgatggtgttgctctactctaacccgaagcttatacccttcgatatctgttcattgctgtttcgcaaggagatttctccattcttcgcattctcgcaaggaacgggtcattactccaagccccaaggcttcaagatagtcgctctagttcccttccattaccatgggcgtaccgaaatattggactgctatttgcaggtatgcacaatcctgccgctactatattgcttgagtctaacataattcaagaaaaacttggtccataataatggatttcttgatcaggtcatctttgtgccgcagactgatgacgctgtcgacatggaatggctttattcgatcgtgaatcaaacacccgagtatgccatttcttctcgatatcatgagatagaatgggaagttgcaaagaataatgtgatgtacatccgaatcgacggcgatatcgtgttcctggaggacaacgccattccgaccatcgtcaaaacgaaactcgacaatccaagcacgctgatggtatcggccaatgtgataaacgaggcagctctcgcatctctccacagtcatccgggaactgcactcccatatctacctgaattgtacgatgtggaacaaccgtcccgatcaaagcttcaactgaagcacgactggcgagcttcgaatcttccaaactggcagggcccgccgagcttcaaaataagcaaagactttgatccgccatttgaagggcatcgctggctactccccagggatgcgggttctgatcgagatcctatcgcgagatccgtatacaccgacaccggtccaaccctgcatgactggactgttggtgcgcagcaacattactcctttttacaccacctagaacacaatgatttgggccgttacaagttcccgatgtgggtcgatccaaccgagcccaccagcgataattttgggtgcttctggggtaatgatgcagtggatgtgcaccgtattttccgcaacaaccaaaatggatcctcccacaattggcatatgtcggatggctctcgtccgcatatcattatagatggcaaggggcttgtttcacattattctgctcgccaaggtgcggctggtctagacgccacggatctcataactcgttaccgagcatatgcgcaggagaaagtgtgtttgcagactgagtgatctcccgacaactctgggtatcagactgtgtcaattaacggaggaacttacatgtacatatacgtatatacccaacgattttgttcaacttttgcacgtctacaactaggttcttaaaagaagtagattctttttacccgggtgctcatggtacatacaacctctctctccaattaagcatctgttacagccttcagctgtgaggcattgactttcaccaagtcttccagcataccccgataacccacaggaagtgcaccagactattttccggttagcaaatgactagcattattccagggcagaaagctcacgtcgttcgccagcagcccttgcacaagtacaaaagcattgtcacggtctttgatctcttgcgacttgtctgtctcctcggccttatcttgattgggagtgcccccgcctagggtcgtcttgagtaactcggtaacttctgtcttgtgcaggcagtctacaacggcggcacaaccgagtttgtttgtggccattagagctagagcaaaccagccttcactgcgaacgacaggccactgagtctgtgtgatcatcgcacctattggcagcgaaacaccctcgtgcagggtgtacagtctgtcaagcaaggaggttgcttcgtcgtctccatcgcgagccttggggctgacagttcgacagatcgaagcaactgtccgcccaatctcagttttgattggcgtggagtcggttttctcgaaaagagataggagtagagagagataggtccgttggtgagccggggaatcaagatcttgtgagaggggagcaagaaggcgggagatgttatccgtcgaggatataatcacttggcgcgcaatacttgcagccgagaattgaacctgtggaacagattcatatgcccataatcgtgagatggcaggaatgataccagcttctccaagaatggctctattgtcaccggcaattgcaagattcttcaggaaaccaagcgaggagtgcagaaccgctccccgagaatcgctcttgagaacggatatcaattctccgtgtattttcaagtctcggaccattacctggcagacctcgtcggaccgggcgagatttccaagcatgacacaggcacagacctgaagttggtcctcggttgcaaccacccatgacttcaatgtctgtgaaagaggagagtcaagggggtagtattgggcgaaaaatggtgaggctgacacctcagccaaagcctggttaatcttgagacggagctgcgcgagagccttgacgtcttcgttcgaagaagggtccaccacaatcgaaaatgaatggcgcaggacgtccagcaagccttccaccattccattcgacacgcagacattctggaacctttcattttctaggtaagcagcaagagaagtcaccaatgatgaaaaatgtgcaaagtcaagagtatcatcaatggcaagctccatcagaagtacaattgttccgtcgggagagtgttcaatgccctcggctgtaagttatatgttagatcggaagatagaccgaggttaaagataaagtataccttgctctgaggccagctcaatcaaatcgtaggaaaaattgagtagagcctcattgtcttcgatctcgccatctttgatcagcttcaataaaatgtacgctgtccgattggcagctatctggacatgtgctggttctgatatcacattagcgaaacgtgcattatttggctctttctagacatactgtaatccatgcaaatattgtagatgaccggaatggcaacaaaaatcaaatcgggatcgaggaagtagcgaatgatagcaagggtgtagtttcccttgacaacaatttccctattctcatctgcatcaactttagttatctgggcacatatattagtaaattcagcatacctgtatcggcacatgagtttccaataactcgtaaagagtggagtaacaacctggtatcaacttcgcccttcaaagaaactacatccaggaagaagttcaaaacaccagactggccaaatggagcacgccacgaagctgaatcataattagcaatttgtaaaattaagaaatagataggattgacccacgatctctgctaccatccgcaataatctcagtcgcttgaaccaagtattcggagttacaagcccagagcttttgcagggtggcgttcacgctttgtagagtgtcggcatcccgtcgccctcgttttgtgtttgcatcggcctcttcaagagatgcatggagctccttgagatcgaagctatttccagcctcgtcaaccgcctgggccttttcaatgatctcccgcaatccacggaacatctcctgttgctcttccgagccaatggtttccgtgcgtggtggcaaagaagaagaaacctccggtagatctgagagaatctttttgataggaggcaattccaaatccccctttttcgagactgagtggccagcatctccatgaatggccagctgggcggtagatatacccgcgtcagacatgttgccgaatcgagatcagatagttgccttcggggtgtggattaaattggaaggtccgtgttgagttgaagatatgaagatacgaattccttgaccgaacgggcaaggccttctcagttagacggaggagcctaggtggcagcctgttgaccccgtcgcaacaatttaaacactgtaaacaaacagcgtttactctgatatgagaatactagtggctttaaatcaggcaacagagcctaaaatggattcttgatattagtggaagacaagcggctcaccagaattctcgcagatacaaagtaagtttagctcttcgtggagagagggatgctgcctgaggtggattcaggcaccaatctcttttgggttaggcccgagtatagtgagatatcgttttctgccggacattgtgtcttcacttggattaaataatataaacgcatagttaactagctatgtacatagttattagttatctatctatcccctcggatcaagtctccattcaggcttgtgatcacgtgctccgctcagacgtgtatgttgtaggaagcttgtagaagaaatccgatgaggagtatatctattccgaaaaaaatatattatcactttgatttttaggctgttctctcactagggagttttggctatttcgatataggatataggcccgattgaagggaggagaaaaaaagaaagaaaaaaaaggatggagctgcgcggaatcgaaccacgatattcaaggaatgaatcatgataatttcccgttagggagaatcacataagcttgatggactaaccattatcctacagttccttaaccagtagcctatagcttctaattttgggagaaatgaccattaaagtgtggtcgtcttcgcaaatctttcaatcttagtacaccatgtactagttaagacgttcagcattccgaagttaactagttagtatgtattatcttatagttaagcacctcttttgcttagtattataatttaaaggtagataaatccataaaattctttccttggcgtagggtctagggcaagttcgggattgtggtctttggctcccgtatgtgtaccttccgactagttatctgactctagaatgataatctttttttttttataaaaaaaaaaaacacggacatccggagggaactgcaatatattctgttttaactcggcaatatcggacttatctcggtgatcaatggacgtatcagtgcccatataagtgcacgtgcagatggtcactctccccgtactaaatacatgatcattcatcgcccacgcaattttccataaattgcggatgtatcagccttccgcagttggagggtcagtcctggaggtatcacctgcatttaaaaacagatacttgagccttggagcgccggagattggagattagtaatgaggtattgttacagtagctcgggggaataatgcgtggtatatatctatatgggaacagatatgtgcatagttattgattatcaatgcctgttcgactcccactcaaatcatgtataagtgtacactgtcggacatcaatatctagtcgcatttgacagggcctatttggatcagtggagtctcattgtcttttcctatatccaattaaagagctgtaaaataatcgtcgtaatctattagggatgtggggtataaagcgagggttagttagtctacctttaatactgtaaaagaagtaatcgaacagggcatcagacacctcgatattgtcgtcgctaatgccggcattgccgaatcatatccacccgtcaaggatatcaggcaggccgatgtagtcgagcatattccaacgtgttaggtgtcatgtcgttgtactaggctgcgcgcagtctactgtagaagtcagccggaaagcattataggatccggggccggtggtctggcgtatatctgctcggatttgggacacagtaaatagaagcaaattatccaacctccagtcccaagtgcggcgtatcgcgcatcgaaatcacttgccaactggtatgatgttcggatcaacgaggataagaggctcaatgcgtttgtcttggattccgcctgggtgcagaccgacatggacaatgctgctgcacagctttggacctgtaggaggtgccgaagacccatgagaagccaattaccgggataattgaggtcttgagcactggaaccaaggagtagtatggcggcaaattcgtggtgaggttcaggattggtgatcatgggcagatcggaccaaattagggtttctcacatgaagttattttcgataccaaagacatgggagcttaatgccatatcaatgactctagccactatgacaatggtcaagcatagaaataggagaggtcccgaggtccgggagtcaactgctgacataatatagttcgtgccggcgtgctcaaaacggatctcactgctctgttcgttcttctctcttgatcttttgatatacctttcaaacatatgggataatttatatagaagaattatatatttaataaggtcatatacatagtaaccatctaaaatccaaatcccctgttaagagatcactagttatagacttggcaggtacacaagaccagtgacccggtccggggcgccaagaagcgcatcgcccaagctggcctttaccgcatacagcactgcaaaactccgagtcgaatccttcattttcgctgcaataacccggtgctatcttcacgattgacctctcttctctcctttgtgaacctcctatcgtgtcgaccaatctcaccatgacacgcgctgtccagaccctctccgttcttctccttgtctcctcggtatgctacggagtcccttcatctcagaaaggaacacaatcccgcatggatatcactgacaatcgatcagctctacctttcccttttccttggactcgttcccctgaacgagactgtccagactgaagtcattccagttgtacgttacccaccccgtcaatcctccgctccccggacttcgagtgtgtcgaatgagataaaagctaacctacaatcacccagctcccattctacgcgcttattgtctttgcttgctacctcctcgcccgcctgggtgtggcgatcttcaccttcaacgacgtccccgaggcacacgctgagctacaaaaggagatcgagcttgccaaggtggagttgcgccagggcaaggttgaggttgattgattgagagatggctgtgcgcattggttagatggataaccagacactcggaaccaaccttggcatacaaggtctgggcctgggtctggattggattatgtctttgcaggattgaaaaggctgcgccggatcaatataatacgctatgccccagtgactttttgtttccgctaccaatggtatattctcttgatacacttctacaattcaatgtctgcaaagcaacgttggaggaccaggtttccggttgttggctacaacgagactcccggtgattacggggcactccgtttcagaaaaaaaaaaaggagcaaggagtgcaatagcagtttcaaggcaaaaggtcttttgggggcagccagccggtctgccaatctgccaaaattaaagaactttttctatagaaattcatcaaggatatcgtaaaaattacatgctcaggtttgtgcacctggtctaagcatggacagcaaaatcgaggattaaaagtgtcccaaatatgaaccatcagagcatcgcacaaaagggaatgcttatgataatgtaatcatttgcttaaacaacctgaggagagggttctccttgaaccgcctcagtagaggcttcttcgacatgcttttggggaatattgacgataggggacaatttggcctgactatcgtgctcttcaatattcctacagggaaaaaaaaatcagccacaatccacaatccagaagatataaagttgggggtataacatactcagcctcccaagggtagcagatccagacatccccagtggtgaccgcggcgtggtaacgctggtcattgtccgtcatatctgtgggcagctcacccttcttgggctttttcttgttctattccagctgtcagccaaacctatcaactcaaccttcagataaaataaacaacatacgtgcagaacgaagacaaaaaatttagtctccttgtccttcctcggatcattggcagggagctgcttctgagcttttttaacatcctcctcgagctcgttcacggcgtattgtagggttgtgcgagtatcatcgacctcgtcgacgataagaacgttcttgccgatcaagttggccatcgaggagttcatgtcgagccattgcaaacgggtgaccttggtaccggggacctcctcaacgctgtctgtgcccaatttttcgtagagggacagaccgatggcttgaatggggatgttagattgaccaggcttcttgaggaaggacctgtttagcgagtaaggatcaatatagtcgagatgaaggagcacgtgtgaactgaacgtaccggaggatgcgggcagggatgtaaccaccaccaccgatggcgattataaggttgatgtcccagttcgcgaggggctctttcgccgagttcttgcagagattgtggacctgtgaaggatatttgtattagtttcagtccttttaaagttccgagtgatgacaattgtggactgcgataagagacaatctgcattttgcggggttgagggggaccttgatgatattcatgtgtgtttgtgatgtcttcaacctcttcttttttaaaactaacacaacgacatagtgtctagtcaatagaccgggattcttacatcgttgtatgtggcatattgcttgttttccgacatgttggcgattgtgatggtttcgaaattggatggagatatgaagaagataaatgatatcccaataaagatcaagtatcaagaagtgaggtagctgtcgaatgttttcccacagagaaggaaaaaatggaggggaaaaaaaggaaaaaaaaaaaagtcggaccgaaaggttatcggcccgtccacgggtgtgcggggcttttatctgtagacacttctatgttgtgcagcttgacccgggatatattcatattcacattcatattgacatgcattccattcgaatctataatatctaagtataccaactaggctcgggcacttcatgtagtagtgcatatcgtcccaattctcgattcttgtaagccaccggatcatgaagagtgtgcacgcgaatatcccgccagaatcgatccaatccaaccttggaggcggtggctcgggctccagtcacttcaaatacaccagaagtaaccctgagtccgacatctgtggcaaccaccttgacgctagccacccactccgcaacctctccacgttcctgggcggtgagatcagatttatgcgcctggtatcgagtataaagccctgagagttgatcgcctgctcgatcggcaagggcttctgtggcacgcagatgcgcaaagaagttaccatagcgctcgaggatgtagaactcatccgttgcggattccttgttgtcgccgccgaaaggccaagcccgtgttgcggttttagtatatttggaggcgaaatctaaagcaccaagggcaatgcccaagtagaaattgctgaaaaccagttggatgctgtggggaagagcgaaagtcagcattcagccatgtaactgctgaggaagcatgacatatggaatggcatagacagcactcacgttggcaggagtagagtggggaatgcgatcttcagggtgtcatcgcgaggcctcttagtagctgcatcccagcccagtgcatctgaccaagaagcacggacattgtcaatctttacgcctccagactcggtcaggcgcaacccaatgttgtgccagttgtgagcaaactggataccaggctgttgggtcttgaccaaagcaaagatatgatcctgggtaccatccaatataccttcaaggactgtaagatcggacacaacgcctccagtgttgaagtacttgttcccggtgaatacgatatcgtctccgtctggggtgatattcagatcggcgtcgcgggcgttcacagcgccaccgacaaagtagttgtttgaaatgatcaactgatgggttcggtcggcttgttcaggagtgcccaccacgtttgcaatggtagaccagagaaggtgatagccaagcagcataccaatagatctgtcttcttgttagggactatccttcggattcataagggatgttgggatgttacccatctgcctttgcaacctctctgattgccttatatccaacgctccagggttgctcgccaccaccatacttcttcggtcccagaagctttgtcaagcccgaatgcttgagcagggccacttcggcgcggggtgatttgttctcctggtctctttgggccgcatccttggctagcacctcggagacctcccgggctctaacgatccatgcctcttcggtgtccggcagattggaccatgtggtttcatattcggcgtagacagccggatctgtcgctggagcactagattgggacatggcggaagggtatatgcagtatggttgatcagttcaagttctatttagatcaatggactatttcttttcatgggtgggatatgagagagtttataaatagtttccttgcggggggagatcttacatgcttgtcactccatatcacgcaatgccgtgtcactccaacacccaaaaatgagatccataaaacttcggattcgtcagattcgtcagacaaatacaatatgtcgttattatcgtcaaagtagcgccataattcaattaaggcgttccctgttgcgtacacccgggcgaccgctcatacttagatccttgccaacactgcttgctcgttcatcaagttcagaatctctctacgtaaattctctctgcgtaaattgaatggcctatatttgtggtaccaatgcctgtagataaataccccgcagaatggtatcgaacaaactgtagctcgttgtggtttgaccaacaggcccggaaggggagggcgactgttaccccacccgaaaagcatcgactgttcaatgtatccatgttcaatgtatccatgatgcttggacaagcaaaacctggtgagatgaccgcaggcattatgatcgtgcgatttgatgtgaatcatatgaagctcctgcttcatccactatcctccagaagattctggggtgaccagtactctttctcagggctctgggcatccaaccacactagcccatcagcaagcaagtcatctattacggtttgcgctcgagctttttcccatttgaggttcaaccgcagcattgaaacgctcacaaatcccagcacctgaattacttccaagactgttgcctgatcggtgttgagttctttagggacggaccgaatgtactgcttgctgccgaccttaatgatggagaacccggaaccaagaggctcaagagaccgaactgctcgcaggatgtcgtcactgtcgattacgtatttcagtcagtcccttgtgtagatatccgtatttcctgaaagaacaacttcatactctgaaacctcgagcccacttccgatcgccttgcgcttccctactctcttccgacactcttcaacaccaatcagcccaccattttcgctcctcgtctctctgcacagctcgacaactctgactgcaacctcaaagtagaagtcattcatatctccgcccataatctgggtccagaagctacccccctctcccagtccgcggcggccattcttgcccttgacgttgcttgcggcaaggggatcaaccccgatggtgttgcacatgcgcgcaaactctgctcggaacgtcgggttggactttatcgtagagctatgttctagcgcaaatgtgtggagcaacgactggaaaaccgacaactgggtctgtagggaggcagtatgcgtagagcggagattggcgccatgagtggcataagattgcgttgcctgagttcgatttgcaaaggccccgaggccaactccgcgacgagacatagtatatagagtgtaaggggaatcacttgataggttacatgtatgtagttaccccaggcggtcacccatgaagtcactgataagagacaaacccttatccagatcacgataagggctgagcccataacgggctagcgctagttggtttataggctaaccgtatacggctaggcggtccacacccacacaagcgaagtctcttcttacattccttttcttcgagctttttcttcttcccttgacatccttcgacaaccagccgactctcgacctcgtccggaccttcaaaatggccgctactacgtatgattcccattgacttcttcctaagactgatgcgatctctgcttgagtttgtaaggttgctggtatagtcgtccttctcgctggggatgccagctgtttgtccacaacaatgacggctaggcaccagctcgatccttcctgccctctatctcgattccaattatctcggatacacttcttgtatatcatggagcatttggatacagaaaaaagggtgatggagtcttgaggttgaaagcgcttggcgccttctcctccaaaaatattgttgtgaactatcgttctcgggcgctcatgatgtggtaacagcgtcttgatcctgaagcgacaaagtgtcaacatatatttcctgaacattgttcggggttttgtcggatgaaggcatcaatggcatcttgcgggtgatccggcttacgaacactatgctggaatatgcatagctagtactgaactgtaaacgatcattaaactccgatgccttggccctcactgattaaagacatttcgtcgagttattttatgccttcagttgagaatgtggcgctatatgctgcaattctttcactcggcgaattgtctcagtctcgatctatttcggacagactgttctaacactgcacagctccgttcccacccagaaccaggtcctcgttcccgagacccttctgaagaagcgcaagtcccaagaggctgcccgcgctgagcgccgtgccgaggccgagaagaccaagaaggtcagttttcccgatttttttcccacattgcgacacctcccttccaactacatgatgcataacaccattcacgatgactagaccgctaccacggtcaatgctgtcgtctgtcaaccatctttcgggtctgacattagttacacaactatttgccattttcttcacaagactttggagactctcatgctgactgagattcatataggccaacaaggagaagcgtggtgtcatcttcaagcgtgccgagtcctacgttcaggagtaccgcactgctgagcgcgagaagatccgcctcaaccgcgttgctcgccaggagggcagcttctttgttgagggtgagcccaagctcgtcttcgttgtccgtatcaagggtatcaacaagattgctcccaagccccgcaagatcctccagcttttgcgtctgctccagatcaactctggtactttcattcgtctcaccaaggctactcaggagatgttgactatcgtcaacccctacattgcctacggttaccccaacctgaagtccgtccgcgagcttctgtacaagcgtggttacggaaaggtcgacaagcagcgcactcccctcaccgacaaccagatcattgaggagcacctcggcaagttcggcattgtctgcatggaggatttgatccacgagatttacaccgttggccccaacttcaagcaggccaacaacttcctctggcccttcaagctgtccaaccctaacggtggtttccgcactcgcaagttcaagcactacatcgagggtggtgacaccggtaaccgtgaggagaacatcaacggtctcatccgccagatgaactagatttattctcatgaggaactcgggttggagcgttctctgagcgcacttcttaaaaagttacaaaaattttacgactttactgtcttgggttgtttttttgcacgggctgtttatatccactagtcaattctttagcgatacgatggtctggggtttccgatcaatttaatgcttcaaacaacccaattgcatggtcgtggacttggttcctgtcgtacgttttctcgtaactgttaactgtattccacgactgactgtcccagggctgggcagtcttcaatctacaacactgtatcggagccctttggtagtaatcaggattttgttaggccgaatactatcccgaggtcggaattccatgtcgttgagctaccctataggctatttttgaagctgtgctgaagccgcacgatcttatgatgcccatcatctcgataagctcattattgtagtcaaccagttggctttagtggtctcatgttttgtctagaccgtgagtgactggtcaattcatggcatgaatgtgttaatatcatataacattagatttaccaactctttgaataccgagggagatagttatcatcatataatgaagaagtaatcccaactactacagggtctagaatcggagtggacaaatcgaatcttggggtgatatatatctagctgatacctatgtactattgcattccttccaacgtttctacgtcaacattagattttaatgaccctttgaactctcctgttacgattgaccacaaggcagagctgtcgtccctgccagtcagagcccgatgcggatgggttatgtggtccaggcttgaaagcgccttcgcggagggtttcagtaaagagctcgtaggatgggtaatctatatcgataatttcagtcagtatattcagccatcaatagtgttattgctctctcaagtatacacatacagccgtccacaaagttgttgacctgttcttcggtcatcccggtgcccttggcagcacggagtgtgcgttcttgttcctggcgccattcgtagacgaaacgaggggtttcggcatcgctgagactggttagttaaacgaaagtattacagcaacaaagcacatacatatggattaaagcatcaagcttgctgcaaaggaaacccatgtcagcaaaatttatagttgcgcaattgcaaatggcagaataaacccactcggtcaagacatcataccgcttcaaagcgtcatttacagctttaacatcctcaaacttgacatagcctagtcgtccatcatattcgccgttatctttttgacgcacagcggcctcccatttcgcacgcagggtttcgtcatcccacgcacggaacccgacacaccacccttcgaaaatcacgaccttgactttatcctgaccctcttgattgacgacctcccattgtgcctttgggacacgatcaccttggccctcgaatgcagacttgtcatactgtggaatggctgtcggacgttcagcggcgagcgaagcaaacacctcctcacccaatacgaggtcgtgagtcgaaggttgaccacgatgctgcagtagtgggtttgaaggatgcgcttgtgccagagctatctgatcggcatggtcaaggtagatatcatcaagcgatagcgtcacaaccgcgagcgaatatggttccgagcggagggtgtcatggagagcggatacctacggagactggtgttagattccgttccgaggaaattgaacgagatctcgaggcatgggaaattgaccagctctagatcgactcaccagaactgtcttgcccgcaccctgcacgccattgagaccaatgaaaaacggcggaatactggggttgctgcggtgccgctctgtatgaacgcgcaggcgatcgagtatgaaagggatgcagtactgtgacttgtcgtccacgatttcaggcattttggcttagttttaagttgtctatgttatatcgcacgtcttttgtatctatcggctacggtacgcggaaagtttcccccccaatcggccgagtgaatctggggtcatccaccccacggggtatgttcagccgctacttttggctcgacattttaagaacctcggaattttatcaggaagtgcattggatcgagcaacaagacaatggaacagtaaaatagtccttatacgaaaagatgtacaagtgcacatgataatgacgttgcccgtcacatgcctgagtcagcaaagactcggtcccggaagacatttacaacgcttgcacttacaatgatggatatatgcatatgtttcttatgcataagtatagcaatttagtctatatccccgtttattttcattaaatcatcagaatacttaaatcacttgtatacgaagtacgccggcatgtgatacgggacgatctgccattgtaacgatacccccatatttcatggttacaaaaccaaacgtgccgaggtcctccgtttgccgagttgctttaaactcccctcttctccagctttcttcctttatttctttctattatccacttgattttcggacacatcatatatacagaatgtccgagttgcgatttgataaccaaacggtggtcgtcaccggtgccggtggtggtctggggaaagcatatgctcttttcttcgcctcaaggggtgcaaatgtcgtcgtgaacgacctcggtgtctctcacaagggtgagggcaagtcgggaaaagtatgccttatacctccgaactagacaaacagatactgacagctactccaggccgcagatgtcgtcgtcgaggagatccgcgccgctggcggtaaggccgtcgccaactacgatagcgtcgagaacggtgatgctatcatcgagaccgctattaaggccttcggccgcattgatatcctgctcaataacgctggtatcctgcgggatattagctttaagaacatgaaggatgccgactgggatttaatcaacagagtccacacctacggtgcatacaaggtgagcaccctcggagacataaaaacaagcgcttgaaacaggaactgatagccttttctctggacagtgcgcaagagccgcgtggcctcacttccgcaaacaaaagttcggccgtattatcaacactgcctcggctgctggtctattcggcagcttcggccaggccaactactcagctgccaagctcggcccggtcgggtttacccagactcttnnnnnnnnnnnnnnnnnnnnnnnnnnnnnnnnnnnnnnnnnnnnnnnnnnnnnnnnnnnnnnnnnnnnnnnnnnnnnnnnnnnnnnnnnnnnnnnnnnnnnnnnnnnnnnnnnnnnnnnnnnnnnnnnnnnnnnnnnnnnnnnnnnnnnnnnnnnnnnnnnnnnnnnnnnnnnnnnnnnnnnnnnnnnnnnnnnnnnnnnnnnnnnnnnnnnnnnnnnnnnnnnnnnnnnnnnnnnnnnnnnnnnnnnnnnnnnnnnnnnnnnnnnnnnnnnnnnnnnnnnnnnnnncacggacacgcgggccaaggagggtgccaagtacaacattattgcgaacgttattgctcccattggtaagcaagctaaaaaccccaacgcatgaattggaaaagctaatcctaaattagctgccagccgcatgactgcaactgtcatgccaccggatgttctagagaatcttaaacccgactgggtggttcctttggtcgctgctctcgtgcactcatctaacaccactgagaccggtggtatttatgaggtcggtggtggtcacgttgccaagctccgctgggagcgagctaagggtgctctcctgaagactgatgactccctgacccctggtgctatcgcccggaagtggaacgatgtcaacgatttctctcagcccgagtatcccactggccctgcagacttcatggccttcttggaagatggcctgaagacgcctagcgctcagctaggagaggagcctgacttcaagggtcgtgttgccctggtcactggaggtggtgctggtctcggccgtgcatactgtttgcagttcgctaagctcggtgcctctgtggtggtcaacgatcttgttgacccagagcccgttgtcgaggaaatcaagaagctcggtggcaaggctgttggaaacaaggccaactgcgaggacggtgatgccgtcgttaagagcgccattgatgccttcggccgcattgatatcgtggtgaacaacgccggcatcctgcgcgacaaggctttcaccaacatggatgataacctgtggaatgccgttattaatgtccacctccgtggtacctacaaggtgaccaaggctgcctggccctacttcctcaagcagaagtacggccgtgttgtcaacactgccagtaccagcggtatctatggcaacttcggccaggccaactacgctgctgctaagcttggtatcctgggtctttcccgcactctagctttggagggtgcgaagtacaacattaaggtgaacaccattgctcctaatgcgggtaccaatatgacccgtaccattatgcccgaggagatggtccaggctttcaagcccgactatgttgctccccttgtggttttgctgtgctctgacatggctcctgagccctccaccaagggtctctatgagtgtggtagcggttggtttggccgtacccgctggcagcgctctggtggccacggcttccccgtggacgtcaagttgacccccgaagaggtagttcgcaactggaagcagatcaccaactttgatgacggtcgcgctgatcaccccgaggatggccaggccggcgcggagaagatcatggctaacatgtctaatcgcgtgcacggcgatgcctccagcgagaacgatatcctcaagaacattgagaaggccaaggccctttcgagcgagggaactcccttcaactacgaggaccgcgatgtgattttgtacaacctcagcttgggcgccaagcgcacagacttgcctctggtctacgagaacgacgaccacttccaggcccttccctcgtatggtgttgtcccctggttcaacaccactactccctggaacattgacgacttggtgaaggatttctcccccatgatgctgctccacggcgagcagtacatggaggttcgcaagttccccattcccaccgccgccaataccctgacctatcccaagctcattgacgtcatcgacaaaggcaacgcggccatcgtcgtggccgggtacacaacgaaggatgccaagaccggtgaggatctgttctacaacgagtccagcgtcttcatccgcggcagcggcggcttcggaggctctcccaagccgactgccgtgcgtgccaaggctgccactgctgcgtacaaggcgccgcagcgccagcctgatgccgtggttgagcagaagacctctgaggaccaggcagcgctttaccgcctgaacggtgaccgcaatccgctccacatcgaccccgagttcagcaaggttggcggcttcaagacccctatcctgcacggtctgtgctcgctcggtgtttcggccaaggctgtcttctccaagttcggtccctacaagaacctcaaggttcgcttcgcgggtgtcgtcctgcctggccagaccctgaagactgagatgtggaaggagggtaacaccgtcttattccaggccaccgttgttgagactggtaagcctgccattaccggcgccggtgcggagctcctggagggcgctaaggccaagctgtaaaatatgagatctttggttgaagcgatgttgacattagtaaagcgagccggcacagctgggtcggtctgttgcttcttttttgtatatactacctgtgctttttgtttttagtttccccatgatgcatttatcagccgctatctgatctattaactattcctacatatgtacctgtatgtaccggattttaggccacagtcgcgaatttcccgatcggggtgccgccgcttttatgaaggcgctcaggctcctgctcactgagtatttcacagcacgggtgatcactgtgagcacttagcttagtaatgtaaaaatattgctaaaacgagtatcttaaatcacgtgataggtggatcattcatatgtggtcccgaacggatgttagggcctagtatatataccgctgcagtgacaatcggaggttccgattgtccctatgatcttttggccgagtggctaaatgctcttatgtgatcagctaggcgcagcggcctaagaaaccctctggattacaattttgtgtaatactagtcacgtgaccttgtttcttttcgcaaaaaggtgggtccatacctgatttttactatatacaggttttgaaccttgaacactagaggactgcgtactataggggttcacattactagtgtattctagtgcgagtgttgagaaacccagccagttcttagtaactacgtgggatccaaagggaaggcaaaaaaaggcttctcaatgtcgatccagccggaatctaaagactctctatttttatatgtggtcaatctagccagccaggccccactgcaacagtactttccaacctacaggaccctagaccgatccaaaagtactgttgcacctagaccaagaagattaaagactacacccacgtctacagaggcaccctcattaattggctcaatttaaccggatatcgccttgtttggaggtgataaaaatcccctaggaatcttagcagtagtctagtaatatagtaatacaaaatttagggctaacacagaatatatggctcttttcaccataggaagtgcaaatatttagtggcgttatattatcagcgttattgaactctttggactactcagcatcaatcggagcagacctggaaattatttaatatatcctcctgattcattttccttgtggaatttctagttttatttctctggtcgatccatcaattttcaggatatgcatagacgtattgattaaaagccaaaccaacaagcctcaacctcctattaatattttaattaggcttgacagtacttcctgaggtacctccatatgagcaaagtcacgacctacaagatgatatgaaaagaaaaaaccaacaacaacaacaagcaagaagcgaacaaaaagcaaaaaagcaaaacgaagcagaaaagaaatcaagaacacgaggcaaaatgtgagcggtggtaaaccactacactagaataatcccaacgtccgtcatagggtcatcctctgctgaaacgtccttagacacgaagggggggagagagatgacctcttgcataatgtaggtcaagagatcaactaccttaccgtagtttcttccgagggctcggtgggaaacggttgtccactattcataaatcagacacttgccctcagtagtaatgggataattggaccatacctcgctgtcattgtttatttggtgaaaatgaaactcatctccatcactagccatgccgtagacaactgtattgacctttctcagggtcttacgttcttggtgaacgatacctaggagaaaaggggatggttagaaaagtactgttagacatagtctattaagacatacccatgtagccaaggagttgggcctccccagcgctcaccatacccttcttcttggcctcaacgataaccaggttaatcgccttttctgacatcgcacgggtttctccgtaccacaaagtgtaatccgcacgtccgctggttttgtactacctcgtatcgtacaggatcgcgcgagaggtcatgcaggtttcgtgttctaggttcaagggccattgcctatggtcgctagacgcagagacctgatccagcactgagtatagtagaatgtcaatgacgcatcgtgctgctgtttctttttgagtgctgcactagctgcctctttgaactattcctaacatttcgactattagatgtcagtatgtggtcactgagttattgtatccatatgaccaggcagaactgagcaaaatcagggcaatatgtgggaaaacgtaggttattgggatatagcctagccgaaaagtacttccagggaagggacttacgagcacactgtgggagaggggctcctggagggggatgcatccacggggcctggtctgttgggtttggcgttaggcgaaaagcgacttttacttcctttcgggtcattttcccaatggggacctttgggagagggagtgatatctgcccatgttgttgttcggttttggctagaagtgcccagaactcatccttttgttctagtctcagacattctttggcatcctggtatacctgtttcaacaagagggaaggatccttaagtaagtctgaagacggggatatgggggtcggaaattctgatgttggcgaggaatccaaagaggaactcgaagatcctggagacaaatgtgtacccatcggatacgacgatacaggcgccgaagacatggatttctgcgaagaatatgaggcttttcggggcatgattgtgggttaaaatggttgttgtgggttggaagacgaaggggagggaaacgaaagaggaaacagatggatgagggtgactgccaccgcgacccaaaaaattacctcacctcatcgacactctggccgccttcctttttgttcacaattggcaaagaaggcttcggaaaaaccttagtattacctcaggtcttggtatctagaaagcttcgtacgcaatgtacccctttagctgacaatacttttcgcgtgctacatacatgtatccgcctcctttagacgacttcctttcatcaggagtgggagttggttcataaaaaagaatactaccaccttctttctcctccaatatcatttagctcgcctaaccatgaggtataaaaagaaatatgtactttgtagcagtagagatggggataaacgtacgatgtacaacatatcggcactttgctttgagagcgccgatctcagtcagccaccgaatgcgataaattagcttaaggatagagaaaagcagagaaacagaaaagacacagaagagcaaagcaaaagcgatgcagaacaaagtgcaagccaagcgaaacggaaatatcaaaaagaaaaattatcatgcttccttgaaagagacgtcttcaggaggcaaattctccccagaggctgaagcagggggaatggcttttcgggggagtaaatcagggccgagcgttacacccacaaagtccaaatgtacaacgctggtccacagaacccacccttcccatgacatctgtaggataaagaaaacagaggcatcggtttcgaatgcattgcaaatctcaacttccatgttcgacgggagtgagcgaacggcttttgaaaagtcatccacagcgtctcgttgtccctcaagcgtcagcttcaccagcacgtgattttggctcactccagataatggccgagggaggcgggatcgactagtatcactgaacgcaaggctgattgctctggtgccgctaaacgtttcaaacacggcgtggggagcatgcttaggcttctcgacttgtacttgctggtaccactcagccgttgtgaaattctgttggttcttaaacttttggacggcacggaacagtctttgggtaaacgaagcggtatttgagcgtacggacgcaatttcttgaactccacatgccgcaatgatgtgaatgttcgttgtcgagttgggctgccgtgctgcagcagccgcgtggcagcaatcgagtattaccagagaatccactgactgtgcagattccagagtacctctgatagaccgccacagaattcttttgtgacgtgacgtaaagcacaaagcatcatcatgaaggccaccatgaccaacataaaagaaaatgaacagagagggtagtgacgaccggatacattgtccaaggagtttgttgagattctcttgcaggctccaggctggtgttttgtccgaattcgggatcacaaatctgttacattggaccccaagcggtttcagaattgattccattgtcaccatatcattctctgcgccagtttcatcgttttcccaccggatcaatatgccaatctttcgcacatgaaacttgctccgtgcggaagctactttcttcagcgctgcttcaaggtcaggaagctttctggtcgagactggtttggttgggaatgagatggggatagtgcttgggcttgcggccgcaggttgctttgcgggtgactttaagcctggtaactgcgacatcttgctaagagaacaaaatgtcagcctgtgtataaagtgaggggactgatcttagcctcacttctcggtcagatgagactagcagggttgtagaaatcagaagggtgattgttgtttggcaaaaaaaaagtagtagtgcaaaaatcagaaggttgatcgttgtttgaggaaaaaagcaaggagagttaggaaaggggaggagggtggtgtttatatctgtgattttgctgccttcccaattgggcgacggcgaccatccatggattccgttggtcctgtcttctttattatttctattgctctcttgttcattctattgtcctcttgttcattcctattgttaactcataactctctcaccttcaatctctctctacccgcgcttaaactatgtaatagccctggaggtaagataccggaactctggggtagtgatatacaagagcctacaatgtatccaatcagtggcacgctaatcgctccactctaggacgcctaattctataaatgaaatcatccactgcccttaggattgatcgtagtatactttgttaagtatacattacggtgaagtccatgtcgcgggatagtcactagaatattaggcatagatattgtagtggggagcctacctccccactacaatcagtacatatcaccttttcttgttttttttcttttaaatgttgttcaggcgttatgttatataagcgagcattgggatttgaggttactgtcgaagtccaaggtcaatacatggtggagacagggtaattcacccagaatatcatatgacatttggtacctagcatgctatacaaaaatgtatattacagttagtcatcgatgtccgcatagattgttgaaaaagcgggttttgtcatttatgttagagtcatccatatcagtcatttttaccatacattggtcgtaccacagatttctgtcaggttctttaaaggacattttctgccatcaagaaaggcatagttactctttacattccatgggcccggatcggatgaggttttatggttcttacaataaggattgctagaataggcatagtagttttgattctactatggttcgtcctaccctgtcctacctctatcaagtccctaggtctgaatttcttctttcttttctttccttttcatcaatatctctgcctttaacttcagcaaaaactctcacttatcttttacctttactaggccttgacaactcccatgggactagaaaaatttcggtcccagattcttagttaatcactaatttattttcgatcgataatttaaatataggctattctactctaactcccttaaaggctaaggggtcagggaggtatagctatagttatatggtttatctcgtttctaataacccctaggcaggttcgtttttagtctcgttattcttattagattcttcttatactattacgtttatcaagactagctctttaagcttcttaatcctttcctcttatactcttaggtagggtagcggctcgcttatagtggcggctcacttaccgattacgttaactgagcgggtctaatgattatataatagttaggggcgtgttcagttttactcagtaagcaaacagcggcaaggggtgagcactaaaacagaaagggaaagccatgtcgcgaggcctaaaatccggtatatatgtatgtccgctcaagtgaattatacttatattgcccacgcaacggccacaaatgtacatccgatcaatgtagcgtttagtaaggggaatcaactctggcattctataccagcagttgtataaatatagattctttgctattttagttttatagtttgacattgcgtgacgtattcccaaggagcatgcgattgtttaagtgaatcgtacggtgtagatgatgtttcagcatggcttaaagggatcgaatcatatactgtcgtgatatggtgtaagagaaggaactgtctatctagcaaatagaaagaacatttaatgtctaagagatcatagagtgatatcgatgtaaaaggatataagaaaggtgaaaggcggaagatcgtcttatgtaacaaatcctccattcttcactgttcaatttaggctgcttccaatacattattacatatatcccctttccctttctcttcccctgacatcttctgacatcttctgatatccccttgacactttcatcttcctaaaccatgtaaagcctacacaaccatggtgctctcgctgccagttcccggcttctccagatcctccacatcccgccccgccgatggcacgcaatctaaccgaaagtcagcctccggttctgaaaccagctcctcgtccagtcgcaatgcccggaagccatctctaggacagactggctcctctcctcacagctactccatcaccctcgaagcactacgaaataacccttttggcagtacctccagatcccgcggccccgtccagttctcggcccacgaaacagaggaacacaagcgggaacaggaggaactcaatacggcactcgagactctggttcgaatattccctgacgtacagatagaggtattccgcgagctgctgctacgctttgacggacagagccggttacaagtgtgtgtcgaggagctactcaggcataagaagaaatgggtttcggggcggtggaatctcccggaaggaaccacggaagctgaggcagagggaattgctcgcacagtccctggagacgaaaacttccctcgacaagacgttggcaatggcggcctggtcccccccgaggagcggtttcggttcgatgaatacaaggccgctgtgcggatggctatgacaagagaatataatggcctgaataagagtacagtggaggctgtcctcgctgaagtcaacttcagctatgctcgggctcgaccgacgcttcgggatctgtcgcgtcggacatggcgcgcgacattcaacagcatgttcccgtctttcaggcgaaagaaggaccgcgaagaacatccgcttctggtctggcatcgtggtgtagacggggagcttgttcctgttctgaaggagaccgggtgcagcgagctggatgcagagcttcacgagatgttgttagccccgctgttgcgacagaggcgcgaagagcagcatgataaggatttccgatttgcctcagagttgaatgcgaaggaagcgcaagaactcaatgccctttatgaatgcgagtgttgtttcgccgacgtgacatttgaacagattgcgacatgttcaaccaacactcatatcatttgttaccactgcatccaaagaaccgtatacgaagcattatttgggcagggctggggcaagtctgtcgatttagagcgctctactttgaagtgtcttgcgccgttgtccatcgggtcgtgcgagggatgtcttcatccggagatcgtcaagcaggcaattattctcgacacggctggcttcgagacatatcgcaaattcgaggatcggctctcctctgaggcgcttatgaagtctcagctgaagctcgttagatgtccattctgctcctatgccgaaatcgacccagtctaccacccttcgtcccatggtgtccgctggcggttccgtcgtgacggtggcattattcctacgattttgatgacccttcttctcctggatcttatcccattactcgtaatccctgttctcattctgctccttttggacccggccaccgtaacagcggtcttcggaaatgccattcgcaacctctgtctcaagatccgacctaaacgattcacatgtgccaacccctcctgctcacgcaccagctgtatgacatgccagaaatcgtggcgagacccacatgtgtgtcatgagccgttactcctggacttgcgcgctaccgtcgaggctgcccgcaccgccgccgtgaaacgcacctgtccccgctgctgcctctcattcgtcaaatcttcaggctgcaataaactcacctgcgtctgtggttattccatgtgctacttatgccgcaaggcactaggtccacctgtacgaacacccgcgcctgcccgtgccttccgcgggttcgatgccttcgatggcccgggcgatatacccgatgatacctttgacgaacaggtagttggcaacatgtccgaggatgacgaattcgaagaaccagaaggctacaaacacttctgcgagcacttccgcatcaacccagggtcccgctgcaccgaatgtaccaaatgcaatctatatcaagcagaagacgaggaagcggtcgcccgccgcgcaggcgagaaagccgagcgtgaatggcggatcagacaaggtgattccggtgccagcaacccaacttcgacagctgggttccgcaacgtgaatcatgatctctcggcaggggccgatggccactccacgaatggccgcgcgacggcttcaatttgggacttgcagcttacctcttcgactaagccgtgggcttactggctcagtgatgtgtgggctgatggacggtggaaactcgagggtcaggcttttgcggactggattgtggaacgggtcatcgaagttgacgatgtatgatcccgggtctacgttcggctacacctttgagaagattttttttcgccttgctttttatttcgggctgcatcttgcaataatggcgcttggtttattttttgcttttcaacccccggtactctatgcagagtatctggggtgacgtgcagtcaatcttatttgtttggagggtttcagacggtatgatgattgatgacactccctacttctgtttgataattgtgtgacttcttactaccaagatgtagcgaggacccttactttctttttaatgcagatcttgattttgagaccagtgtcttctactcctaattgaataaaggtaagctgtcttctctctcttcgggtttcaatatgtcaagtctttgcttccaattccgagggatttgtaatcaatcttctgccagtataactatcgcatcaaatgtgaagttattcattgtggtatacacaaaatgcttcatcccccaggtatttcaggtatctcaggtgtttcaggtatttcgcatcggatcagagagccgctggtcctctttcagccagccatgcttgatcgccccgtcctccgcaatgtgtcatcgccgtgaggaagctctaaaatcgtcggtcatactcccgacaccagtcgtccaggcctttaggccagtattctggcttttcgatcaggagcaaccaggatggtgcggaggaaaattctaccggggctgccgatagtaaatgggcttgtgctattattagcactgagatcatgcacggcacattatattatttctattgaagtgaaaggaactgaaacaatggtctatatgcttttatcagccaaagtctccatagagtgccccggcttttcgtgagctctcagacgattagacctagctctctcttttttcttcgtccagctctccattgattcgcttttttccttcttccttcaaagcttgatcatcggctcggttcaaaccaacctgtggcatcaacaaagcagccaaaaagaaagcaaatgtcgcaagggatgcaccaacaatgaaaatgatacggaagcccttttgatatgccggtgtcagcactttacggacatgctcagaatcctctgcagataaccttgatagatagctctgtggacttgagagaagagagcgggactgagattcgtcgagattgaggaccgagatggacgacgagacaatattatttctatattggttaacaagagaaccaaaaaaacagaattgaaagaatccttacatgatagttccagcgacggcgagaccgagagtaccgccgaggtttcgtatgaaactgctcacggttagctctataaaatgactgacatcaccatgggtgccactcacttcctgaatgaggttatcacagccatatcccgtctttcgacaccggcttgaacggcaatgagagagctataatgaattagtttaattcatttgactaggataggaagtcacatacggctgaagagtatttccaaccccgacaccagtcaggatgccatacccaatctgctttcccaaccccgaatgctgatcgagtgtcgagaaaagaccaagaccaacagcccagataatccatccaaaacagatgcattcacggtagcgaccgacccagtgtacaacaagaccagaacctgtactgctgatagctgtggatgaagtcagcatagcaacgcaaccaagaagaagaggactcatactttgcatgagggtaatagggagcagcattgcagccgcttttaccgtcgaatatccaaataccagctgatagaaggtgggaatatagtagatttgcaccaaaaagttccacccgttgatgaacatagtcaaacatgcgccattcacaatcctaccctggaagatatgcataggaaccaacggtgtcgaagtacccttccactgccacgcaataaaggcaagagagatggcgaacccaacgaccagagtcgcaataacatgtgctgagttccattcatactcaccaccaccccaagtcaaaccaagcagcaagaccgaagttcccccgagagcaagaagggcaccaaagaaatcaattgccttcagcttaactttccagttgccagtaactttccgaaggggcataaagaaaaaaacagccagcgtagttaatgcagtgagaggtagattcaagcggaagatccatcgccacgagtcttgtgaaatggaggctagtgcacctccaatgatagggccaatgccattggcaatagcaacaacggcacctagaataccttgatatttgcctcgttcacgaagaggaacaacgtcgctgacgatcatttgtgcgactgtcataagaccaccgccaccaactccagtgaaagcacggaagacaatcaattgcgtggctgtctgcgcaagggaagctgccaatgacccgaagaaaaaaatagccaggccgacgaagagcacaagcttgcgagaccagatgtcggatagttttccatatagtagttggaaacatgttgatgttctgtgtcacgagtgttagtatcgtgaatgcaagagaaaaaagactactcacacgaagtaaccgcccgaaatccaggaggtctggtcgctggctcccaattcatttcctatgatagataaactggccgccagcgtcgtctggtccatcaatgccagaagatcaacgctagaacatgccaggaagatctaggggctgtcgttaattgggccagatattgcttgttactgtatctactaaccgtgatgatggtgcgcttaggcacgtaattagtttgttcgttgaaggtgacattagtcccattcttctcaactgcaacagcctctgttgagtttgaattttccagtacccctgtcatggcgtattgatatcatgaagggataggaaagtaaacagcccagatatgcggtagaaagagagaaagcaaaaaagagaagagcccaagcggactaatcaatttcatctattcacattcgtcattcactgattcattgatcagcgtttagtttgagcaccttgacagaagatctgcgcattagagttggcaaaacttctcaaacaccctcaagatacccgcccctttataccatgtacctcggaatacgggaatattttcagctgatagaaactaaaggtgaggacctttgtgatcattgaatcaattctagaggaccttgtcagactatgtgacatgtgagaaatcagattcaagaacatcgcaaggtacgacgtcaagaataccagagcatgacgcagccacagtacgaattattccgttttcaaccattctatatccaattcctgtgacaaagaggcttaccttcatccgtacagagagttggatctacacttgggccgtgtcaatatccccgagatcgctcatgcgatttccttgttcatcattttagcaaatctccaagacttcagcgtccattcatggcatttgaccctcatattagtcgactcagtagtggagtacgagtagatcttactcactacctcttggacgccaaggaagacgcaacaggatggaggggaggggcaaaggatgaacgctgtagaatttattctgtataattgcccagagtgacccgggattttcttcccttatatctgctttcgtcactcgaggagattgtatgctactcgactagtatcagcatctatatctcgcaccaagtgtgtttcaacaatatggtcaattcttccgagaaaataaccaatatgaacgagcacaatgtatacttcggcattgactcgttgaagaagtacttcgatccggactgtcagcctcctttgcctcttgtagagctgccacctcatttgaatccttatcaccaagatggggtacggatatatgccaaaatgatgaccatgcatccgactaacaacgtcaaggcaatgccaggtgagaaattcccgagagaacaccgagcatcaattgcaagctaacacgagaccagcattgaacatgctggaatcaagtgttgtgcccggcgagacgaaccggatcatcgaatacagctccggatcaacagtgatttcgatgtcaatggtcgcccgagtcatgcacggagtaaatgacacccgggccttcctgagcaacaaaaccagcgatgcaaagctgaaactgatgcaattcttcggtctcgacattaccttgttcggtggaccatctcaaccagagccattggacgaaagaggtggcattcaaaatgcccgaagaatggccctggagtcagaaacgattgtcaatcccaatcaatacgaaaacaacaacaactggcagtcccatatccgatggaccggtccgcagatcttcaagcagctgcctgaaataaacgttctctgcgctggtatgggaacatctggtaccatgaccggtctggggacctatttcaaagacgtaaagccatctgtctaccgacttggtgtttgtacagcccctggtgaccgggtacctggtcccagatcatatgctctaatgcgccctgttgagtttccttggagagcagccgtggataccatcgaagaagttggctcggccgaatcctatactctctctctaaacctatgccgagaaggattggtctgtggtccatcatccgggttcaaccttcaaggtctctttcagacgttggcaaagcgcaaggctgcgggaactctatctgagctcgcagggccagatggcacaacccactgcgtcttcctctgctgcgacctaccatatcagtacatcgacgagtacttccaaaagctaggcgaggagcaatttcacccaatccggaacgaggtaaataccccctatatgacgtgttggcgtcttaacgagtcttggaaatagaacaagagttgacctatctactatttaccagcgcctgacaaaagttgacctgcaccgatatgacgagagctgggagcgggatgcgttagatgtcttaccgcagttttatggatcaccgcgatcgcttgcgcaaagcctattgagcgagattgtcctcaagccgcagaatcacgttctggacttgcgccaaaaaaatgatttccacgcgtggcacctccccggatcgatacatctgccattgtctagtgttcgacctcacagcccgtcaccgttctcggatccaggtgttctggaggcacaatgggcggagctagagaagatcttcaatgatgacgtctttgtctcagatctgagacggcatcaaatcctcgtggtatgctacgatggggattcggcacgcgtggctactagcgttcttcgggcgaaaggcctcgaagcagacagcgtgcgtggaggccaccgtgcgctgaggatgtatggaatcgggaatgagagcccgatctccgttgagaaggggcctattaaggccactgtttctgtggcagcggttccccttgaacagagaacctgagacccaggaccgtagcgcaatcgactgggaaaatgcggaatgtagggttggatttgccatgtgaagcgctagtcccgatgcagacatcttgtacctcgtttttcccccttcttttcttattttcttggtcttgttttcaattacttcatcgatttggttcattgtttggcgcatactaccctatgactctttcaatgagaatattgttttgactccttttctacatcttcccacgcgtaagagaccagtgtccaccttgtctctccgcatgcgttgaatagctcgcatttgagagaatcccggaatattcggaagtcatgcaaggacatgcatgatgtatgatatttgacgaggggtgctgacccccacacggtgtcagatgtcagatccaatttatatcaagcgcaaatgtgctctagtccaattagcctgtgatattccaaccaaccacgagtctctgaatgattccaggccccatatctctatgaaatgtgctcaattgtgagcagatcccctcgggtgatcgctgggaataactgaaatgactagaatgttaattcaaaccccctcgacaggtacaaggagaataaaggagatatcccgttttcggttccgccacccaaaaacaaacttgctccagatctgtcgatcataccttatgtattccatgatatctgtatttccttgaccatacattgtaggtattggtatcacttattttcggtcacacaaaatgatggacatgaagatggccgagggcacaccctggctcgatcagccggtgatgcttcattcgtctcgcgccgacaagtgcaagctgaccgagtctcaatgtctctatcgcaactatcactggcgatactggtatgcatgttcttccgagtcacctccatgtatgtgtgcttatcggaaatctgttctaggtaccaagccgaccatgtttacgcattgaacaccgtctacttcatgtgtgcggtgattggggtgttcgcgatctcgaacttgcttgtacgattcgctccagatagagtgaaacggaccagaccatggcgcatgttcacctctgcctcacgatacctttcttatcgtggatatcgattgcctgcgctgcgatattggtctccagcattaggggtggtgattctaggtgctgtaggcgctgtcttcttcttcggtgggtgtcttggacttgcgaggatgtgacggggatggtggttgacttctttatagcgatgacactcggcccgcaaccttattactggccaacagatgcttcttatggaagtagtcctccgattgcgactcgatcgggctggatggctcttgcgctgcttccatttgtactgtgggtgttggattcggagcatacaagtcggttgctgaccttctttagggcactgagcacgaaagctaacatgatctctggcgtgaccggtattccgcatgagaaacttcaagtgtttcaccactggactagctatgcgatgtttgtgttggccttgattcacaccttccctttcatcatatatcatatctggaagggggatatgatgtatcagtggaagacaagtgtcgtttactggacaggggttgctgctctcatctcacagacatatttaaccctcatgtctttgccatttattcggtaggatcacacctacctagcttgactactagaagactaactcttccacagcaatcgattctacgaattcttcaaagccacgcacatcttcgtggcagtggtatttgtcgtgtttttcttccttcactgcgatttccggctctcttcttggtaggttcgactgcaataagccccatgatgacctcgcattaacatatatcagggactacttcatagcctcaggcgtgatctatttcttaagcatcatagccagtcacatccgtacctatctaatgcacggcatccacaacgcgaccatcgaactcgtccctagcggtcttgtccgcgttgcagtcccatcaatcatcaaatggacaccaggccagcacgtattcgtgcgcttcctcacatcagacttacacctactcaccgcccaccccttcaccatctcctccgcatgtcgcaatccagacgaaataggaaaagcctcagaactagtattctacatcaaaatccgcagcggtgtcaccggacgccttggagcaatggcatctaagaatccaggctgcacgaagaagatattaatggagggaccatatggcggcgtcagcgaacctcacatggcgcgattcgacacgattttagtgatagccggcggctcgggaggcgtgttttcactagccatggtagacgaagcactccggctgacggggataaacgcaccggcaggcgagaaacaagcactgtcccgccggaacctccaagtcgtctactcgacgcgcgaccacgctatggtagactggtacatcgatgagatcaaatcacggctgtctgagtcggacatgttatccgcgcagtcggacaacggattcgagactgcggtatctgtgcacataactgacccgcagggattgggaatttcttctgcttcggaatctgacgatgttaagagcacgtttggtaaggtgccgccggctgagattaccactgcggggagtttcagtttgaatgttcaccgcaatgctcggcctgatattcctagtttggttgcgcgcactgttgccatggcacatgttcaagggacacatcttcagaagaagcagcgggttgggattttggtttgtggtcctgcttctatgctacatgatactcggaatgcggcggctttggcgcaggccagggtgtttgggggtgagattgaggagttgtatttgcattccgagcctttcgtgtaagtctttggtttccttgctatattatgactattggctaactggtttctacaggtggtgagtgctatttgatacagagtagcatctgctggattgatcttactctttctcttctcttctaccagtttatttattgcttccaattacatacgtttccatctaagacctatgatttgctgcaaccaaaaagaatcgcataattatctcagaaaaggagcaatatccaaagaaatccaatttattaacggccaagaccctctaaaccagtctagagcccgagtctatataaatcctaggttaatacacggaaatgtgagtatgaactaaatagtacagaaagatataagaacaatcaccggccagatataaaacaaagtctggggatatgaaacaccggggccaaagcccaaaagaacaaagacgccgaacattgatcccataaggctgagtggagagacgagaaaaaacgtgagaccaaagatcaaccaagaaatgcaaatctaaacattaaacaaaatcaaaacgaagagatcgtcaggtcattaacccatcaaatcctaccttccacgcttgtcacaaggatgaacatattttcttcctctttggatccttgagatccaatcaatgccaaatcactctcctctctcgattcttctcatcaacgaatccctcatccgcacattgaccacaccaccaacaccgtatgcaggaacaatcttgcccatgcgcgcaaaacaactaggcacataatcgcgacgaattcgcgccaaacggtctgtccagtgcaggccaccggccggctgtcggttatacagatccaaaccgaggaggtgcatgggtgtactagcgaactgcatagcagcggggcaggcaaattgcgcgatgctggatttcattgttgggcttgaagcgaggaagtctgggaccgaaggggcgatgagggcggggatattgaaagaagcccagattgtgatgctgtcgcggagacagaacagggcataggagacttttggtatttggaggtttggtgctatgggtgcagagggagcgcatggtgcgcgcagagcggagctgtacttctgcgcgactggatttgtatttacggtgacgtttgattcggagggaggagaggcgccgaacattttggcgaagcgcgcatctttgtagacgcagattgtcatgttgactatcgttgttgcgaagaacttggggaggcctgtgtcaataacgttatagggctgatggtgtgttgttgatcggagggtgtcgattgcgtttgctgtgaggtaagtcgaggtgtacagggtgtagatgaggatgaatggagtgctgaagaagaagccgcaaggtcgagcgaccatcgatcggagcccattgttgatcgtttggcggattgggaagcctttcgaagccttttccataattgcactagaggaattagtcttcttttcggtaatagcacctaagaactatcgtaagtcacttaccgatcaatgatggtgatcaatggacaggtcagcgcaccggctgttgctgcactagcgacatcgacaccgattcgcttgcccaggtccttggtattccatgttgaagctgtggagcgtttgcttggtgcctgtccttgacattcctgaccctgttcctttactgtggccattgtaaatattgtatcttgtacaacagcatcccgattcgtgctcatgtagtatagacgagaaacaagttatgcattgagtaaaactgtacacatgataaggtcaaatgagacaaaatgaattacgaataagatctgggggaagatttatatctatcgttgatctcccccagtttcggacgacaatgaaccggccgcggtccggcgccgaccctccgatgccggcctagcttgtcggctaaacgctgttccgttttatacaggcaggtgtgtgtatatcattgtttttgtgtacattgccaagatagatacaatgaactataggtttgcttcattatactctgactctcattttaaaatcacccaacgccatataccaagatcttaactacatatctagcgagctacaataccatccatagtgacatggaccgctccagcttgaaccaactgagataaaggttagcagaaattcgacttatgcaagggacacacataatacataccgctcgttgcaagtcatcaatcaggtcatccacatcctcaataccaacacacaaccggatcaagtcttcagggaaagcgcgctccgcccgtgtcttcgcatcaatgctggcatgactcatacggcacggcatactgatcagactgttgacacagccaaagctgacactgatagcccagatcttggcgctctccacaatgcgctcgctaatggccgtgtcaccggtctcgaacgagagcacagcaccggcgccccgcgccatggacttgtggagttcatattgcgggtgggaccgcagaccggggtagcgcaccttgaagccaagggactcaaggaactcggcaatgcgctgcgcattgctctgctgttgttccatgcggaccttcaacgtcttcacgccacgcagcagcagccaagagtcgaacggcgacaagccacatcctgatgcgttgatagggaagtataggcgttctccgagctgcaggtcgttcacggcaatgacaccggccatcaggtcgtggtggccggagaggtatttggtaccactctcgtagactacatcggcaccgaagtctagtgggtttaaaagaaggggagacatcatagtgttgtccacagagacaatgcaggctgggttggcttcgtgcgcggcggtagcaatttttccgatatcgacgatcttgatcagcgggtttgtgggtgtctcgagcagcaccatggttgtcttcgagctcaggacctcctggaccttctcaacctgtgtggtatcgacgtggtgcacgatgattccaccgttggtcgagaggaacttaagcagacggttggtgccgccgtagaggtcgtcaccggtgaccacctcgtcaccgggacggagaagtcttgtgatcacgtccaaggctgccataccggaggtcaccaccagggcgcgccgtgccgacatgatcttggccaagtgacgctcaagatgtgtgcgagtggggttgccggaccgtgtatagtcatactctccaccgccggcgttggaggtttgtttgaaggtagcactctatgtgataataatcagcatttatgtccaattggaagtaatattctatcaccgggtgtggatatgtacctgatagataggaacgctgctggcattgtattggtcactgccctcggtgaagaccagttcggtggcaatattgtaccggcgaccggtatgagggctggacggggcaggggaaggtggaaggtcattgcctgacaggtcaacctgagggaaacccttctttacaccgctggatgaccccgaggcggcattgggaattccggatcctgacgccgacatcgttgtagcggggcagaaagacgggagagagagtgtgtgtgtatatggagggtaattgaggtgaattgaaagcaaacaagactcaaaagatgcgaatatgccgaaagagaaagggggaataggaacaaaaatcaaaaagaaaccgaagaaaccccaagcagttcacatcttctctccccccggaccaagctgactcgtccacgtcggcgctgattcgtcgagccacggccattgcgatctcgtcatccgctagtcccgattaggcatgcaggtatgtggagtttttatgagtcaaacaatctacgttgattaactaactagttcacgaagtttgttagttatgtccatggtgattatggaagagttgtacatagattgagagaggcaatgcccaatgtgaaaatggagactttaatatcaatgttagtatagcttagctagacatctcaaggcttgcttaaatttattttgatggtttccatactgctagcgaagagatatatcaatcgaaattcaattggaagctatgtacggatatatgactattatgactagccaactactctggacatactctcgttagtcatcgacttggcttgcccaggtgcccagatgggacttcccacttttctcctcatctctacatatatctatccacttgcacatgcctctactgagtctggtgtctggaatctgaaaattattcaagcctcttcaataccgtagagaggaacaacaaaaatggcatcggcatcggaagcggcattcgcctatcacgaaccgtcaatcaaaacagtcctcagctataccagctttctcttgactctgaatatagccaatacctgtctggacaagcttctctactgtggttttttcggccaactcttcatcggtgtcctgtggggcacacttggggcacaatggatcgatcaagagacagaaagagtgatccagcagattgggtatttaggcctgatactcttgatttacgaaggtaagtgtgtgacattttgtcaacttgctggatatatctacttacaataaataggcgggttgtcaacctccatccagtctttgaaggcaaatattctactttcaactgccgttgccatcactggggtctgtgtcccaatgggcttttcattcattcttgaggagcttgcttgtgtcggccacccctcttcagtccttcgctgctggtgcagccttgagcgcaactagtctcggcaccacctttaccattctctcaaccacgcagctgacaactacaaggctcggcacagtcaccactagtgccgcaatgctagacgatgtcgtcggtctagtcatggttcaaattatttcaaaccttggcggaagtgccacctcattcactactgtgactgttattcgacctgttcttatttttatcgggttcgccgttggtcttctattgctgtgtgcattctgtttacagccagtattaaagaattgcttggttgcaaagacaagttccctgattttatgggaactacagaatttgctttcctttcacagacgtgtgtgctagttggcatcgtggctggtgcaacatatgctgggacttcgagcctctttgctgcctaccttgctggagtgattgtctcttggttcgatgggctgatagctgaagcgaaaacacaatttcccgccttgcggtctgctgaatctcacgggaaaactttgaacgaacaatcgcgcacacggaattgcaaggatcgtactgaagagacaccctcttcgcctacgcaacctccacaggcaaccgaaataacccctaatgatacacctacaggtgaactcatatacgccaaatactacaaagagccggtgaaccgaatccttctccctcttttcttcgtgggtacttccctttgatttaggaaggggcatactaacactagtaggcatccatcgggttcgcaatccccataaccaaaatgttctcaggccaagttgtatggcgtggaattatttaagccatgctaatggcaattagaagaatgatctggctggtgcgattctctccgagccctgtgtcgcgtctggtctctatcatcaagaagccatctacatacgcccatttctactgtttaggtccttggactgccagcagaaaatcaaaccaaaagaagaaaggcccacaaataccagcgactcaagatgagagcgcagatgttcccgccccggataatgccaaagacgagtctcagtcaacgaacagatcccctgcgcccacttttcgccccgattcccgtatctcgctccccccgaaaccaaagtccttctacccgccttctatcctgggattggcaatggttgcccgaggcgaagtgggatacctcattgcttcaattgccgaaagcaaagggatattctccaatgactcttccgaaggaccatctgatatctatctagtggtcatctgggcaatctccctctgcacattgatcggtccgatcttggttggaactctagtcaaacgtgtaaagaagctgcaacagtcaagggtgaatatggggctcgatcctttgggagtttggggaatctaattatctcggatacagtgagcgacgaccatgctatattgaagcccacaagcgataccattggtttaatgacaataatcattctgatatgaatggtatcatgctaatctccaaaaacacagccgttcagccacccatctccataatccctccattcttgatatgagccatgtcgcttcgggtaatgggatccttcttgtcaaaagacacctttttgcgttccgcaggagtccaagacgtgatgtccttcgaatcaccacccagatgcccatcattggccttcttcagcttcgctaatacctttgcccagccccagggatcattggcattggctgtggcctcgggaagctcaaccgtctcatcagacgacttttcgtagcgcgggtggttcaagccatgaattgtgacatcgtgcttagcagcataagcctcaatcttcgcgccatggtcgccttggtcgataccgtactctttgaaatcaacactgaagcgaatgaacagaccgatcatggctccgatgttctttacctccgagtccggcttgaagagcccatttcgctccagagtagcaagcatagtaaggaacattgtaccgaaggcgataaacaccgcattcacggtctctccgtcatcgcagctatttattgcacccgttagcgttccgtcgacacctaatattctgctcggagccagtgagacaaacccaaccatcggcatgatagcatccgtttggaaatacagccccgtcgcttcacagatggcccactgcatcttccagtcaccagctgcctcgtcaaaatctaggagcaggttctccaccaactccataactgcatatccaaggaagtcattgtagacatacatcccgaagttatccgggtcgcgtgcgatggtaccttgctgcagcgtaatccatttagcgatgccggcgtttgtgaagatccatttctctctcgggtgctccgaagcaggttcgagggctgtggctttgtccgcctcctggtatcagaatcagccactatcccgcactagagaatggtatttctctcctaattaggaagtcactaaccgcatcatctttcttcttctgctctataagctcctcatcttcctcgtcctcatcctcagactcatcgtctgtgctttccgtcttccaaggcgcgcgccccagacaaatataggagaaagccttgactgggtctcgggttcgcaatttgaactctgaagccgcgtttcgggagacagagacgggggcccatcgcttattcagttcgcgctcggtttccatgtctacttcagagctgtttgctaggctcttggacttttttggaccactagcggcggactcggttgattttctcttgggaggcataatggaagatgatgaaattgaaacaacggcatagatagaaggtatatcaagttctaaattgtgataggttgagtgggcttatttaggtaaatacgggtgacgcgacttgacgcgtcgtggacacgatcacaatgagagttgacacctcaatttggtagaataatatatttgtacaggtatgtgaacacaaagaacataatgaacacaagcaattgaaatctgtatatactccaactccctctggatgccagtccatgaagtttcccgaatatgatccggatcacagaacaacaacaaacgtaagaaaataacgaaaagtcccaagatgtcactatgaacctcgtccaaggaaattcataaaccagaccgtcataaagacagaatagtcgagagaatcccacaacgccgcagccgaatccaaaccattttgagacagaaaaaaaaaaggaaagctccaaaagatgacagtatataccagcataacaattagattagagtctgcgaagggagcccggttatcctttgtactcgaaagcccccaaagtccactctcgacaggtaaagtgtgtgtaacagcatagaaacgaagcaaacatactccgtgattgtttacgccgccagatcgccaaaaccgccgttgatgccgaagaattggaacctgtcgcgtgttagcaaaagaatatcattaagaaaaaccatagaatcgaaagttcttgggatacttaccagtcctcgacatttagcgttgttggcgcagtcggcccgctacgggaactactactccaattatcattgtcctggctagcagcgtccattgcagatccactcatagtgccatcgagactgtgcataggcggccaggcttgctgatgctggccctccatgccgaacatctgctgcggcgggttgggatgcattcccatcgcgcccggcagtcccgacattatcggcgggctaccatgggagatagacatgctacggcccgagacgggctgcggctggttgttcaccatgggactagggcgcggggccatgccagggggcatttgggatgggatctggagggatgggtcgactgcggtgggctggggtggcgatgtcaattccgggaagaaggcggtgccatctgggaagagttggtcgggctggaagttctcccagagtgagggggagaggttaggagaggtgcgggttactaggaagaagtcggggggtgtggcgggtagagaaaattggccgttgaatggggttgtgggcctggtgttggctcgggaattacccgtgccggtcatgggatcgtgaggaacgcggtgggtgtttggtgattgttggccgccgggaggaggttggtttatttcccgggagggagtgacagccggtgtctggggccgggagcgctcatatgacacggggggtgtaggcccgccaccatttggcatgccgatatccatgtcatcaaatttgcgcttcggcggatcctgcctcttcgaggaagatgattccccgtgtcgcgtccgctgatgtctccggcctgcagccttctgaagtcgctcttccattactttgtttccgaggatagactcgaatagcgtattcaccatctttgccaccagccagacctttgacacatccttgagggctaacatgcaaacattgattctttcctggcaggtggccacgatcgaaggaaccgaggagcgcatttggtatacgtgcatgatcaaggctgagaacagactgtagacaatgaaggcgggcgtgtaccggatttccccatgagcctgtaggttctcaacgatggaggtaatcatgcctgcagcttggaaggcaattgttcgcgatggataagccatttcttcgaccctgtagttgttgggtgcggacgaggcaggcggcatgtgagccctgtgaagaagacagagtgtagtatagtaattagagtgcaagagagccgcccagaaatgatgccgagagcgttgccagcatacttctttgggacagttctgcagccaatcggcgagggccatatccgagtgggtgagatccattgcattcattcgccgtgactttgaagccacagagtactgctgcgacagaaccaagcccatgatctcgcatagcttgacatactgtaggaagaactggacatggacagggtctgctgggtattcggcgacaatgtcgagctcatcctcgatgaaatcatcttccgtcaccatctcaacatccgagtcatctgtattgattccaatcggccgtcccagtgcgacagcgacagaccgatcccgggtgaacagggtccaccatattctcttccagagtcttttgtctggtttgttaagctgggacatttcgacgctgcggtgcattccagagccctgtgctaccaccatagcgacccgtgtccagtagaagacgttcttcgtaacgtctatgactagtcagaaaatccatcaggatagactagtataaattatgaactcaccttccggtccctcccagtaccaacccaaaagtactaatgcctgcacgatggtgacacggtcatcctcgtagttagcatcatacagcgccttggcgcgtttataaaaggtcatagccgcaggggttgtcgagccattcgcatccataagctgctggttagtacagactctcgatcctgccagcagaatcgcctgcagtagtagcaacgacggcgggtttttggggtcacggtagtgacgcatgaagcgactcttgttgataatcggcacgacgggggccacccatttgaagtaggcgtcgaccaactcatcacacagtggtttaggtgggagcaggaatgccccacgctggtgcagaatatcgatttccaagttgtccaggtccgtcaatcgagcgcgggatcctctgatattaggtggaagcgggtagtgcacgacatctgcagttccatggcggtcttgaaccagaagagacagatttgacgactcgcccaagtacgccacccggccggcctcttttatcggagcacgggcaaacttcggcttcatgaattgggcataggcgttattggcggaagcttgttgggcagcctcagcctcggaaagggaagtattgggcatgccgtcgacgcccatgatgttgtttcggtacccaaaggcattgctcttctcatccaagtccgaacttttctccttttctctggatatagagaccgagccagataccgaattggctggctcctcagtgacagtgggtcggaagtgagaaactgcagcgtcgacgaccgaggcagtttgtggtggactgtcctcatactgactatcttccttgctcttattctgattgttcttctttcgtttcggagacgggatcttgcactcgatagagaaagcgacacaattggtgcaaggcaccccgagactggctgcatcacatcgaacctgcgtgacgggaatggttagagagtgggaaaaggggcgtgaccgagggcaaacccaccttgcgagcatgacatgtctaattgaatcgaaaagagaaacatcagctacaatttttcaaatccaagaaggggagagagaatgtatcgcgataagaaactgagccgaggtgcgttgaggacctcggccccagagtcgcgtctcgctagaaatctagacgtacctcgcacgcgcgtgatgcacgttgtctaagattagatagaacgaattagcaagcgcatcaaaatgcttaatttgaagaatctcccttcaggtacaggggaagcgaaacgccgaagaaaaccctgtccctcatcttgctttgcgcccgcacactccccccgcgacaatttatcagaccagaacaccgtgtcaccaatatcacaatagaactaaatggcaccgacggcacagacagcaaaaagagccggcttaccttctgaaactcaacggttggccttgtggaccattgcgcaccgtaatgcccgaagtccccgtcgagcccgcgttgctcggagccgggctggtatggctgtccgatagctggtcggtatgaaattcagtggtactcatggccacacagtctctccatccaggaattcagacttggtcgagtcggagaattggggggatgcgctcggaggagaaggggaagtgatctgatataagtcgaaccaggcgcacgggagtacggggtacggagtataaaaaggataggaaatagaatcttgaacacagcaaagacgccacgcgatcaagaaaacagaacagaaaatcagcaaataagaaaaaagtaccgggagagggggaggaggagagaggaatatcaaagttggggtgaagttggttgtggcaatatcaatttcctggtggagttcccatttggtcagcatttatgtttatgcattggatttacactggtttttatattcttatgttacatgtatattatatccttataatatgaagtacggagtactatatatattattcccttctatttcctactctctgcgttatctaagtaaaagatgaaaaggggtcaaggtaaccctaagaaccctgtactaagtccatatggcgcaggggttcacaccgaaccctcattaactcaacgatatggtggaatgcttctttgtgggagacaggaccactctacaagacattctatctattggcaagcccgggaggagtataataatctacatataggtgaagtatataactcttgaagtgagttcccccaatccctcaattgcgaatactttcaaggcatcccagacgctaactaaacaggaccctaattaggcccactgtgtggaaataccattgcttcagcctcccttcgggcttggggggattgtcccgactgaaagattggtttttcggtcttcggccatgacttgaaagaccccagatctctgcattagccccacgcctccaatgccgagtaaaatgaccacggtcagagcctaccgccacgcgggaggatgcggaggtatggaggggagttgacgcggtatactctcatgtcgggaattctgctcaggactgagctcggagacaatattcagtcatgggccatattggcgggatgtgcggatatatatgcagtgtgacctattgctgccctctggccaccgcttaaagtatacttgtataggggctttccagactatactacgtaaatttgggaattctcattatagcatgcgcgagtgttctgtttcagacatattaatcgagaaaggtactccgtagtgtgtagttgtaggtgtagatcattacagccgatggactcaaactgaacgatatcaaagtcaaaacggtgagattgcggggaggaaggtaaagatggggacgaaaatgacctggggagaagttgcgggggaaactccatcgcgtcgtgagctactccgtacgtactccgtgaatcaatgtaggtttttcagaggacttgacagaggacttgatggacgcatatgagcccacctgggcaagcttgtgatgcctcggcaacttttgagcttcgaccaatgagagtgcccagttggtctatttccattgaattgatgccccactctctgtcgctagaggatacatcatcatcatacatgtaaaaaggacggtctcaggcaccaagtcttttctttactaggcccattcgccggagatccccgggaagaaacggttatgtcatggacaatatttcgcggattgggagtaaatggaagtccgtcggtgagaaaaacagtttattgttgcaaagtgatatacatatcagtcaaatcttcatagagtaggtagggtctttgaactagtgccttttatagtcaggcggaccataaaataatatacatggaaaagaccaattagatatgaatataaccagccctatgcaagtgatatcgtgtgcgcagaggggtccctagttgcatattccaactatgaccacccattctttcctgatttacccttgcccttgcccttgcccttgaatttggactgtttggccccattagattggggtttcttaggctctttgtggtcctcgtggccacactctgtgatttcttcgatagtgtggattacggcatccccaacagctgtcgtgggggcgaagtccacaccgctgacaaattgctcactgaggaactccagaccggccacgaaggtgcagagggcgcttgcaatgcagaaatggctaatggtcatgccgatgtcaagccaggagccctcgtcgcgtaccatgaagaagaagttgagggtcatgatgtccgagatggccatgacaaccatgaagagcgcgctagggggtacctctaaacggcggttaaggatacccagattggcacttataatagcgaaggggatgaggatttggagaatcaagagcgcgccttgggcgaaggggtcgaagacggggataaggcgacgaacgctgtcgagggagaaggtcgagatcgaggccacattgccagtgctgaagaaggccgattgtaggaggaaaaagaagaagagtgccacgcggacatcagagagagtaagggcacggtagtagaaagtttcaccgttgacggtcgtcacgccagggttgttagctttcttcaaggcacctgtcgtgtggacataaatggcatgttccaggcgaacccatgtcacaatggtcatgcagaatacaaagtagaacagcccttcccacgagattgtgagaatgataaatgttggtgagaaggttaagaagatgatcatgagccgatgcagatagtggctattcggatacaaacggtggaagaatggaagcgtgagggaagtcactgaggttcggttagcttttctcggcgaagacatctcatgatcctagaacacactgctgtgtaaacttacctagcacaacccatccaacaacgatatttccgaaaggcaggccttggcgggcctggagagaaagcacagatgatctagtgactatgacggcaagaagaaccatgccaagctgaattcccatgatgatccgcgagccaacacgaccaatagcatttggttctttggattctgtgtcacgatgtccgaggatagcatcctcaaacagcaaatataagataccagtgaggaacatgagtaaaccgccatatgtgctgtgaacagattagccacatggaaattgttgccgtagaaagggatctcacattgtatcaaggttttcaaccttgattactggcagaagagtgaacgaactcatcaaaccgcagccaagagaccaagtcgcagacaataacggatggctgcgaataaagctaaagccatggataacaggccacaatgcacccaaggcaaagcaaacggtgaagatttcgcggtggaaatatgattgaaccattgcctccatgaccccgagaaatacaagtagctggagtccaaacttgaggtatccagtgaaggagcgcacatggcccaatacaatctgccgaccggcaatcagagccttgcggcgtgcaaaaacctcttcccagaaatacaccggaaagaatgcatagaagtagtagcgccaggatgagccctggtaaaggaacaccgagaacaaggcgaccaagatagacgagaagaatgagatactcgccgtcgtccgatgtgagtctgatgttccatgcaagacgtgcagatcaataaccgtggttagcgcatacgcaatccaacctaggtatccaatagagacgatagtccgtaagaatagccagtcatatgtttgtaggtagcgcagaccctcgagagcaacgcgaagaagctcggcagacaccacaatagcttcctcgtggtcaccactggagatgagtacctcaattcttgccagtctgccttcaatcgagttctcgtggtagcccgctagaggatcataaggtacataccggatcaccgcgtgtctcttttgctcctctttgacgcggtacatctccagaactgcctgggtgttggcaagagcggctaacgccttttcctccgggctcgcattgaggtagtctagaggcaattgaccaacggagttgacagggaagtcaagaccgactagataggccatgagcgcggcaacatcagcctgcgctacatcgtgtcggcggacctggtcgaatccccaatccgccgagaaaccatcttcgtgacccgctgcgattccgctagtggagagctggggctgtgcgacaccagatccccagacaaccaagggtgtccgcgtgttatcgggatgaccgtcaccatggctgcccgtgtcactcataccatggtctgcggtgaacacgaacgccgttttatcatctccgtagaaatcttctactaactttgtgacggcctggactccttgatccactaccttgatgttgtgtaggtattcgttcgagtaaggccggaaagagtgaccggtggtatccagtccaagcaggtggaggaagaacaccaatttgtcgtcccgtagtttccggtccaattcagggtcggtctttgccgattcgaagagatcatggaccttggagaatacccaagtatcaagatgcgtggcatcgacggtgaagtcctccgcttcttcgctgtacatctccgcatcgaccctccccggcacggcgccctccttgaacattggcaggatatcgggactgccccagctccaagtatgtcggctctggttgaacacgctgtcgaaattcaccgggttcatcttccaccccgtggtgactgaggacacatcctcataaagacctgcgataagcgcaacatggcctggtcgtgattcagtggggacgcgagtgtgcgagacaccgaatgttccgtgtgagaggaccttcgagcggataaacggagacaggcgaatcaactcgttgttttctggatcggcgtcgggggacgggtcagggaaagcttggaatgccttgtcagcccgtaggccgtcggcgacaaagaggacgagacgtttggcaggtgcggaggctccgggtaatcgctcgacaccatatgatcgcatgccactaacaattggactgacgaagtagatgtcaaagattgagtatgtatagatcaggtggaagaccactgcgagggcgagaaacccaacgcggccgagacgtgccatgatctatgcctcctagatattcaagcgttaaaggagtggaagtggtccactgccacaaagaaaggtagaaaaattcacaaaacgagagatatgaaggtcaaacacaacacgtcaaccgtcaacttgagacgcattgaggaacttggcggtgagagccaatcacaggcctccctttgtttactctacatagttacaacgttctgctttagcatgtatttaccggtcgaagctttgcaatatcttcacaaacctggagaaattgtaccttgaaataaatccagtattatgatccagaaagacatgtggtgctggtaaagtgggtgtgaggatttatacctccctcaagtggctcggagataaaaaaaagggatgttgtagtaagaaaatagtatctcgccgaggaaatctaaattcaacccgaatctcaacagactagtctatggaattatacgcttgagaatatgagtagcattgaggcgagaacttgaggtgccctgcaattgatgtgttgaaggagaaccttgcgaaacgtgtttcaccgggcgcaccgacagacgattaaagatacatacaaggtaggcatacaagcgccaagtgtgtagcaaccttggaaggtgaatttgttgacattaatgctattaaggatggaacaccatgacattcccagccccgaaatgaatagattcctagagaaacaccaacgattgacatgtactatcagtactgctattgcgctggaagagaccgccgctttgtgagggcatcaatgactcgcgtataaaacttggctgcttgtccgcggacgaaagtgatgtctacggtcaaaaagtctggtagcaggttgaccaggtcgcgatcgcggttagcgtctaggtgaggcaggtattggaactcggttttgtcgtaatcagtcgagacctttggtacgactagatggaagtgaagagctgtagggaggttagaaaaatgcgcacaattcctaggaaatctagcaacttacttccattgactccagtctggagacaatcgtataggtaatctaactctctgttcttgacatcacgaatgatcaatcctgttaaatcgctgtatagatcttcttttaattgagcgagctgtgaagcctgcgccgcttcggcggtggcagctgcattggcacgattggcggggccgcccttgatggcactgccggggacctttgcagccccctcgagactggcagctgtgttccgcgctgcggcaagcttggtctgcaaggctttgacttcagactgggcagacgcaagctgtgcttgggcctcatcggcgccagatttgagtcgagccaattcaacatcacggtctttgagttgcttctggagtccacgggtttgaagtcctagctttcgctgaacatccaattcagccttgagcgaagcaaccaattcattcgatgctaatgatgtatcagttcatctggcctagtagctataagacaacagaagagcatacctttagtaacggtctcactctgctttcgcagtttctccatgttggtgttggcttcgacaattccaatctcacgtagattgcggtatttaatctccaaggcatcatgcttcttggtcagttcgcctagccggcgcctcagctctgggtctccaccttgctcggcgtcggtgcctccaagcttgcgtttacgaggagaagaatcttgtgagttgcgtgacatggatagccgagagcgagcgttcttcacgggggacattgatttgcgattatatgccggttccttgtgaatggcagtctcatctccaagctccgttgcgggttggtcattctgttgagaatcttcgacttcgggttcctttccatcccggctcgttgcacgagcgagagggctgggctcttgctctgtgtgagtttcctgaaaactaatatttcgagaaccgctcggggtaaactcgaattcaccatctgttaggagctgtgtgctgaccgcacgaggtcgtcctcgactgcgtgctggggcagctctcgcggcctcgaccggctgcttctttgtattccttgagacaagtgagtctccatcctcctgtttgtcttcatcttcctgttctggtaccatattctccgcctcagttgcctgcacaggcgtttcagcgtcttgcgctgcacctctgggtcgtcctcggcgggcgggctttttgtttgtagggggttctggttcggctatagctatagctccttgctgctttcttgttcgagtagcaggtttgctagttttggtctcggtcatattctcgtttgaggtacgcggtctgcctcttcgttttttggcgggaggctcgtgggtttctttaatttctgcggcttcgacttgcatgatgtcctcatcatctgagcctaacaggccagagagtttggggggagctttccgtttgggcattgtgcagctaatcttggaagtataatcattgtttgatgacaataattgcatactcgcgggacgcgcaccgacaacaacacccaacaccgccttctctacccgacatgtgactggcatccccccgggtcccgcgccacaagctgccccaatgattccggcgactcggctgtcttgtcttactcctggtggacttcaatttacttttactgctctttaattttttgtttccacttagagattcttatttgcgccattattgcgctatatttgatcattcccttaccgtcatggcttcagctggccgaagatggcagcagttattccaagaaatggtgatggttgcaggcactgtgagaaagttcctgtttcagataggacagaatgcttctgacactattatagtctgcctctgcatatttcctcattcgataccttctatcacgtcttgatttcgacccagagagccagaagaaggaggaacaacgacagaagtccgctgctattatacgtcgattggagggtgggaatgaatcagatgatgagactccacggaagggtggtagacgggggaaggggcaacgaaagaaggagcttaccttgaaccaatacgaacaagcgattgcgatggatgttgttgcgccggaggatattccagtgtcgtttgaagatatcgggggacttgatgaaattatcgaggaattgaaggaatcggtcatttatccactgacgatgcctcatctttacgcttccacgtcgtctttgttgaccgcaccttccggggtcctcctatacggcccgcctggctgcggaaagaccatgcttgccaaagctctagcatcagagagtggagcatgtttcatcaacttgcatatttctacattgacagagaagtggtacggcgactccaataaattggtcaatgcagtgttctctcttgcgcgcaagttacaacctgccatcgtcttcattgatgagattgacgccgttcttggaacccggcggagtggggagcatgaggcaagtggtatggtgaaggcagaattcatgactcattgggacggtcttacatcggcaaattcaacgggagagccccagcggattgttgttctaggagcgaccaaccgcattcaagacattgatgaggccattctccgaagaatgcccaagaagttccccgtgacccttcctccaatttcccagcgccttcgcattctcggtctgattctcaaagacacgaaagttgatcgcgataatttcgatctgcactatctggtcaagactatggccggtatgtctggtagcgatatcaaggaagcatgccgagacgcagcgatggttcccgtgcgggagcttattcgaacaaaaaaggccagcgggatgcaaatggatgcaatggatccccaagaagttcgtggtcttcgcacggaggatttcttctctcgcgccggtggtatcaaggtcattcctcagcctgctccattatccactccgactggcaaagtctccgagaaggaggatggagactggagtactgcgtctgaggccacatcagaagctgagactcgacactctgtgatggctgagccgccagagtaaatgcgaggtacttttggtcgccttttgatatttattctccctttatctcgcagcgcgaagacttggcgttaatctactggaaatgctaggctctgaattggtgaatggccattttgctctagtatggccgacttgttgatagaatttctgatgtcatatgtacaatgggtttggatacaacaatctaatacaaatcttgctctttaactgtgttcttgttctattcacaatctatatacatgtacgtatgggggccgacaaagtaccgggtacacataataggtggccttgaccggggaaggtcatgtactgctacgaaatatgccacgaacttgcgacgtagtagcttcagcattctctctagggctttgtattatgtactccgtctgtacaggccaagacaattctattcaattcttctagttcttataattctcgtgggcaattgtcctgctttaaattactccgcgttcaaaaggtgcgggtcgttatcgtcacacctccttggcctcctagttatcgcctgttctccttcacctcactctcttgtttcccataccttcccaaagcttttgtgttgttggaactctttactttgtattttggacgaatacctggatatatgatcaaacgttctctgccgtgctcccagtcaaaggccacgaatgcaagtccgggggtggatgacgaatgggtctctcctagatcaactctgatggcaactggtgccttggcgatacacacttctaagggggcttttattttgcatccttagacttattcgctggattcacaggaatgagttctcaaaatagctttgccaatgcttccccaagcttcaacatgctcagcgcaagcacaacttcaacctcgacggttcgatcgcgccctcgccgcttagtttcattcacggacgacgaagacgacagcaacaatgctacaaactacgcctacgaggatgatgcccagctatttccctcgggattatcaacgactcttgcgccctccgagggtggaacgactcgatcccgcggagggaccccctcgccattgtcatcccgtggagcctcaccacttccaatgagacacccatcacgtgcgaccgaaacgataaatcgtagtagtcgcagtgggccaacatcgttcgcttggagtgggtcatcaaaggcctcgtcgtcgggaggtgctgcgaactttctggactcctcgtggtcctctctccaaagcctcgcatcttcagtattggggagtgatgctgaacaagttactccgaataatgcgacaaaaccacacgcgcgaaggaagccatctcggtctgacgtatatattaagagtgcttccaggtcgacgtggggtccgtcggcaccgacggctccgcagttcggaactgggacaaaggaagagcgacaggctttagttcaggccaaaaagagagaagcgctgctccttgctgatagtgatccgatcgcaagtcgtacgctccctcacaaaagacgcgactctggggacatttcatatcaagcgtttgagccggagcacgatgaagacgctctagcctatatccacaaagtgcaaccaacggacactatcaccggcgtgacgatcaaatacggctgccaggctgcagtgtttcggaaggcgaacggtttctggcccaacgacaacattcagagcagaaatactgttctcctaccagtcgatgcgtgctctctgaaaggccggcctgttcccccaaagcctgtagatcttttgaatgacgaagaccccagggacagctcgataaccccgacggctgcctctgccgatgatacctctgcaaccgcgtcaggggccgatggaaatcatgtttggaagcatgaatcgtgggtgcacatggatgggtttcccggaccagtcgaaattggccgcgttcctcgaagagcattgggattctttccgcgtacgcgtcgaaaatctatatcttactcggatgcagaacctcccgatttttaccgagaaacaatcactcctccgtctcctaccggatcaccacctctaccttcatcatttggtatactgccacgaagtcgaccaaacggcgaccaaccccaacccaaaaccacacaccccattcgtcctcagcatcgccgccaacgcagtagtatccaactgtctggcacaggggtgggaacacttgaccccacctcgactggtccagggcctgcgttagatgggttcactcgattcttcgcgcagcatataccgaatctcgcgcctccacaattcccggacaattttcggacgtcttcctttgactccacatccaccgtcgcatccaatgcatcgactagtctcgagaacattggcggggcttttgaaggatgggttcgaaaggtagcaacacgcgctaaggccggcattaatgagcttcagcaaggagcaaccacccagcagggtagcagcaggggtcgcaatatgtggcggatggatgacctgattgagcttgacgacggcttagtggatggtcggaactcccccagcccgttcaaaagtgcatcgcggaggtctgagttacagggcacctcatcctcatcctcgtctaatcaatataacagcccttcggtggcagcgagcaggtctcgtgcgactggatttggctctggctccggttcgtccgcctatggcgagcgggtcaaggatgattaacgtgtttgaatttcacagcgtacataataagagtctccctgtgtatccttcggagttcaagatttttgcatttcttttccttcatgcgcacccccaagcggcttggtgcttttgttcccactttggcgttgccatttttcaatgccacgtcacaccaatatttgacatcgaaacatcgcatgcatgagaagtgtggacatgaagaatctcagccgctatttcgtcacttgcatacagcccattgacccagttgatattcgcccaatgtctcaaccaggttgttgcgtgacggattttgggtgttgatttggactggacagaagcatgctccttgtcatttcttctggcatgttggatgtatagtaccttcaacgctcttgttgctactgcagcgcttttttctttatcacacctggcttccagcctaatgcctcatcatctagaacaccatcttcgaaatagactactcgctttgtatttgggcttatttttctcttcttttgccgtagcattaggggaacttctgtaaaagcacagctaaattccgaactggaaaagatcagtcgctttccccccttatgcccggtatttcctcttaattttcccacctatgagcacgcatggcaaagatcacagctcattccgacacgttgatggtggaatttctttagttgtgatacgatttccgggaaagagattgtctaattctccatggcctggatttgagaatctactttgcagccaagttggcactgaacaagctctataaaaaaccccttcaactcttgtccggtcagtttgagctcctctcgaacttcgaaaatgcggtcgatgacaagagcctcgacggtcctttcgaccttattcctctctataatttccggaacaatagccaactctctctcatccaaaacaacgggtaacacagcgaataccccaacagcaaccctatcaataagcaatcaaagcctaaagaccatcttcgtgggccgctctcttccggaattcaaccaagatctttttctgggcatcaagtatgccgacgagccaatacgcttcacaccagtcgagctcaagagcgactatgcatcgaaggataatgactctggacattataatctatcaccagaagaagtcgtcagcgctacttctaacctggtatactacaatgctatggagtacggctacgactgtcccgcgtatggatccgataccaccgacatggtcaacagtggtcttatcactttgaacgaggactgctttaacttaaatattatccgacctaatgccgacgagagtaacggattgcttccagttgtgatctggattttcggtggtgggtgggcacagggcgctactgcggatccgaggtatgttggtcgaggaatatagggctgggtacgaatgttcataccttagaaaggtggccgatggctgtggttaaccttatgctacgctgcctatagatataatatgagctatatcgttgaacagagcgcattgaacggcaagccagttctgggtgtttctatcaactaccgtctggcagcattcggattccttgactcggaggaagtaagggtagtgccaatatatagaaacttggatactgaggattcttgagattaacttggactccaggtcgaaggaaacaccaatctagcactgcgtgaccagcgcacggcgatgcgctgggtgaagaagaatatcaaagcgttcggcggtgatccgagcaagatcactatttggggcgagtctgcgtgagtcactggaaatattttggtataacagatgcttaattttgaataaacagtggtgcatatagtgttggagctcatctggtgaccaacaatggcgataacgagggtctttttagagctggtatagtccactgtacttcgtgccattttacgacaccagactaaggttcgcctagcaatcatggattctggaaatgctgtcgggcccccatacaacggaacagaatggcaccagccaatgtacgaccgaatcgtcgagagagccgggtgagtctatatcaaacaagtctctatcaaatgacgctgaatatactatatctagatgcaccaattcattgaataccctacaatgtctccgtgagctgccatacgcagctttatacagcattgcaaacgagggtctagaatggtttgctactgtcgacggctcattcataacccagtatccgcaaatcaactacagagaaggcacattagctcaagtgcctatcttgttagggacaaataccgatgaaggtaccagttttgggacgactggcacaaacaccgttgaggactgcatcaatgaattgactagtacgtgttgtgtatagcatttttaagtcacatcgtgctaagcgagtagcacagcatccaagcgttggatcctcaaccgtccccaagctacccagctgctgtcctactaccccaacgtccccgccattggctgcccctatggctggggaaataccacctggccctcgctgggactcatgtacaagcgctatgcatccatagccggggatgtgaccatggtagcgccacggcgcatgttagcccatcgaatggccagcttgcacgaggatgtatattcgtacagatgggatgtggcagcgttaaatggctcaacaacgattggggtgcaacatttcgcagaggtatgtagtaacccacctagtcttagatacaacctacctagctctctggtctgcaagatagactgacgcttgtatcggttatacagatccctttcgtctttgcaaatccagtgcaggccatcacaccgctagggtccgaccctgagcgcttgaaactggcccaaatggcagcgcggatgtggacatcattcgtggcagacttagatcccaatggacatggtggttagtagaacacacgtgcggctagaatctattgtttggcatctgacttcttctttctagtgccggatattgccaaatggcccaagtattcgtcccgagcgacgaactttgttttccgcttaccccgaaatgagtgttatgtcgaggctgacatataccgcgtcgatgggattgattatatcaacagcatcgcgcggtaatgtgggggtgaaggcaagctaggctagatcatctacgttgtgtgcatgaacaagggaaacagatggcagacatgtgttagtccaattgactttcttcgtcaggtaacgagtcaaatcaattgacagcaaagagaccaggcgttgattttgttatccaagtagcctgccgaccctatgagacgagcaggaatgatcaatgtggttctttttctcgtttggtaattgcacatcttatatctagccgaaaattcggaaacatcggttgatttaaacactcttagtgccgaccttgaggagctcgacctcgctgtgagcagttagtttcagttgtctcttataccttcgcagcaggactgagaaaagagatgagttactcacaagacaagcttagagttggcggggatcaggccggggaagccactaagatgattgaatatcagcacaactctcatagagagaaccaaaggtgcatgttggagttgtgagggattggaagcatccgcaaaaatgatggattgttgattcagcattgaggttggttggttggtacgtaccggtcgccatagccgaagtcactgtcgagaatcgaatattagcagtgttcagtagatccgcgcaaaagtgcaaaggaaagagaaatggcaactcacgggctgatggtcaggatggccttctcgccgagggacatctggggaacaccctcgtcccagcctaattattaggttagcaagctgaagaaatctatatttctgacacgagactcagtcggggtatattgaaacgcaccgcggatgagacggccgacaccgatgggggtggcaaggggcccacggccgggcttgtgggaggtatcgaagctgagggtatattagcgcgtgaggcacctggaggtggtatggagatttggcttacaggctgcccatgaagtggttatcggccttctcggggtcatacaagcagccggtgtagtggatggcaacgtgctcgcccttcttagggtagtcaacaccgttgccctcgaccagagtcttcttttcgacgcccattgtgaatgtaatagagatatatgtaggatgaatatgggagttgtgaagagaagaaacaaaacaggaagacggggaaagctcgggaggggcagattatccacttttttcctgggcgggggacgtacggagtggaactccaagtgtctttaagacgaacaacatggttgctttactgcttaatttattggctagcattcagatcatagactgggtatccatatatttactcaatggcaacttctggtgattttcagcaatagaataccccgaaaactcttttggaactgggatgtattcctgacacggttgcttggaaacagctggaatcagctgggaatagctgggaatagctcgaatgtaacaccagggcgaaaactacaacacatagggatatgatctgcgcaagacgggcaaattcgtgggttttgcgagtgccaccgatgaaatctccctcaatgtcatgatctacgacaggttcagaccagcccttctcttggactagagaaaggatcatcctatttgttccctcgatgccccgcggaggggtaatggcggggggaacatctccgcgataaccccggggctgnnnnnnnnnnnnnnnnnnnnnnnnnnnnnnnnnnnnnnnnnnnnnnnnnnnnnnnnnnnnnnnnnnnnnnnnnnnnnnnnnnnnnnnnnnnnnnnnnnnnnnnnnnnnnnnnnnnnnnnnnnnnnnnnnnnnnnnnnnnnnnnnnnnnnnnnnnnnnnnnnnnnnnnnnnnnncggcgataaccccggagctgttctataggtatgagagtagaaatatcaaggcaagatcccattaatatacagcatagattgtaacatcatgaccaaaatgccatcttcttcacgtcctccactgaaatttccacaattcgcgtcttagggaaccgaggatcgggcacaggagatgtcactgatgcttccaactgtagataatgcagtgttgagatcccagtgcgatccacaaaatcaagcacggggcggaagttcaaagcaacctggtcgacgccgtggctgtcatcggataaacagaagcgacccttacgcgccaaaaattcctaaaatgatcaaattagtcaaagatatacaacaaagaactgcgttggttaccttgcagatctccgctttgggatacggttctgtcattcccttgcgcaacgcagctgaattgagctccagcataccgccgtacgaggcaataaagtccaagtttcgtaaaattttactccagacactaggccaggtagtaaagctgcgctccatatcatcgctcttcagacgaatcaagtcaaaatggcccacaacaagcggtttgagttgctccagcatatccagctgtgcatcgaagtagtcctcgaatagtcgctcatccgttccgccggctttctctcgagcctgctcgtacataggtcggtcatagtcgatcggtacggtatgcatgtggtgaaccgagccaatgaagaattcaaagggaaatcgtgaaagtgagcgttcgatcaaatctttagaggcgggtcggatccagtcaatctcgaagccgatgatgattttgatctgggaggcgtatttctcgcggagagagactgcttccttccagtaagcggcctcatttgctgcatggctttcttctgtttctccagattcgaactggatgattggttaattcaagttttgcagtgtatgtgttccttacgcacttcctcgggataaaaatcttctttgtgacggggcatatgttcagtcagacaaaagacttgcatcttcttgctgatggcagtttgaatcacatcttccaaggagttttgggcatgaccagggcagaattggcccgaatggctgtgatgcgagaacggcatgttttatggatatgtcactgtttgtggttagcacaatattcgaagtaaataccgagttggagggcaggaataggcttagctgaattgaactgtgaacaaattctatactcacatctgccttttaggacgttcgaagaagatcaaatatgccggttacgtgggggagtcagacatctattgatagacgataaggatttcgccgcacgggtgttttatagcgcggagtaagaagtaacaattgtatgaatgcattattgattcatagatcgatactggataattcagtatacaatttcttgatcggtccttggatctaagcttttcacatttgatttctttaatataccccaatgagatgttacttccagccaccatctacccagacatcgctgaccacaagggtgcgaaacacgatcgtaccggacgccaatgatgaggtcaccgagtgaagcgcactgtcgttcaactgtcgttcaagttgtggacatgcttgaccggtacgactcaattgcaagcattgagccagaccaatcgaacccaatagcaaatcaggtcaaagccttgacttcctctaaacccgctctctagaacagtgtccccagtagctccccagtagttgcacactcgaaccatgatatcatgggtaccaggcaatgactgcttgccgtcctattcacagccttaagagaccgagtgaaccagccacaagagttgcgatgggattcaaccctaaagcagagtctaataaaccgaacaattcatccagcagccaaaacagtagcaacgacgtactccccatcatgcgagatcgataacttcgcaaccctcccctcacccgtatccccatccagcgcattcccaagataaacaatctcaggtctccgacttacatcctcgccaaacctccctccatcctcctgaacccggaccatgacatccttccagccaatcgaagccgcaccggacggcgccgcttttcgcgccgcctcttttgccgcgaagcgtcccgccagccagcgtgttatgtccgccggcacaggtgtaggctgttgatggtatgcggcgcgtgctttgaggacttcgctgaagcgcgtgtgaaagtcgtgctgttcttggtcgcagagaatgcggcgcgtgaatcgtgggagatagttgggtcgggtgaggaggcgggttattcgtgggatgtggacgatgtctgtgccgatgttcaggggaaatgggaagggaaggggtttcattttggggtttctggttgttggtgggcgttcttgggggagttgttgtgggagtgaagtggtaggtaggaaggttgcgggaggtgttggacacctcggaatagccgttgagcttttttttttttagttgattggagtacttgtgcttaactcattaggaaattattgatcgtgtatgaatttcgcgtgtgaccattagcgtggtttcagagcatgcttgttctatgctgtttacctctacatgttctcgtttcgctttacagtccctcattgctaaagcactcccattgaccggataagcaagctaatcggagccataaagagcaatcaatactcatgccaaggtgaaagtccacagagggctcttgccaagcaccgactccgagcgacccggtgtgagattgcgtcaaagcaatcgtaccactcatctttcttcttccgcgattgatcttgctcactggcaggggaagaacaggtctgaaaagccagtgtcaagaggatatttttctatgcagcgtacacgcctcctatgtacagatcaatcaacctcatccgccgacatcccaagatcggtccgtgtagctcctcgaaaaaaccgtggtcacaaaaaaaagctccggaagggcggataaacatcggtgcgcgctagaactggcacaacttcggaggcagtttgattgaatacaaatcatagctcctcatgttcgaccgctccatcaatataagccgtatcgaggattagtttaatggccagcggcgggcttcttctcgccgccatcaatctccttcatgaagttcctgtgagatatgaagttagcaagacgctcggggctgatataagatccaattcatggtcggtagttctctgttctcggcgacggtgttggacatactggacgaagttctcctcatccttggaggaggcgttgatggggggaccctgagcggtcttgggcttttcaccaccggacacggcaagccaggaaccggcgaagatgctgccgagggtggccatggcgagctaatgagggggtggaggaaacccggtcaacttccatgtttcacaaggatccgcacgaagcgcgatggaaaagggatggcgagcacgcagcggcgttttgggagatagagaaacttacgacgtgggagccgaccttcttgccagcgatctggtagtagacaaccattttgtagggttggaattgaggtacagcgagaggttcaattggcagcgatgtggacggaatcctcaggcttgcaccaaacgacgaggtcggcacggataccgcctttcctaatatggttagacagttcacatgacttcggaacagtggatgattaggtaaggacactcggccacccggccgcatccgatatcatgtgaccttcccgaagcgaaacatcaacagtgcattggcacatgaagatcaatcacaacacgagaacaccaaaaaggctggtttgaactcgatgaaaggaagaaaccgataagctaaagctcggactcaaaacgtttgacgacgaagaacaaataatgagttcggcgccgacatcatcccgaggtcccgtattccaaggttacttctacatatcccgatccggaggataccaacggtacctcggaaggaaactaccacagctgatgctatatgtcggctatggctggctgtcttcggctgtagtatgcggttaatatgagaatctttcaataataactcgtttcatcccttgcacagctttccctcattcttctcctttattgtctacatattatatacccccttcacgtattggcacgcgaataagcgttgcttgactacataaaccatcaccgatcatctatactacatccacaatggtctggggcggtcgtcaaccagatggatcccagtctcccccgcaggagttgttggataagcctatagtccgagagaagctcccccccaaattgcagcagttggttgatcgggaagacgacttctatgatgacctctactccccatagtatgtgaagctctgatgattttgtgtttttttcttttttcttttcttttttggtccaagcaagttacagttgctgtcgctgtcgctgtcgctgtcgtgtgttcggagatatggaagggagatagagcctgaaaaataaggccggtgtacttccttaccaccccgcaaactcatctctagcaaatcagcgcaacgccgaaagcaagcaaagacaaaacagaaactaacgatgggcacctcggttgacgacagctcggtcgattccacagacacggggtatcgctatgccgcgtacgccaaccgcatccgcacgatcctcctgtccgcccatcggtatgtcgcctacacttcagacatcggcgagtccttccgtccaattgcacacccatggctcgtgcgctctgcctacactatctcctggacatacctgctaggcgatgttggccacgagggctacaaggcctatctccggaactggagggcactggctcccaccggtgaggcatacaaagatgctagccagccttcgaataatcagattatcaagggcatggcgacgggcaacatgacgattggaaaatcagccgtgtctaaggatgagctttcaaactggtcgacccccgagatcccgcttgcggaggactaccgcatggtcatggtcaagcgcgcggtatttcagagtatcgcgagtatgggattgcccgcattcacaatccacagtgtggtccgctactctgggcagatggtgaagggtgttaagaatgcatttattcgtacctggacgccgatcggggtatgtaccccgggcgaacaggcaaatcagtgaatatgatgctaacgactgtctcttatagcttggtctcgctgttgtccccttccttccctatatcttcgatcatcccgtcgacgaggccgttgaatgggccttccgtactggtcttcgtgcttacggtggcgaagcagccgtccgcccactaccaggcaagagccttcctccccgggaagaggaggaacaccgcgctgttgcggcagcaaatatctcctgggacgagtacaagactgagcgggaccgcgcgcgtgagctgcgtcgccagtcaagtgagcaggccgtcagtggtggaatttcgtcgctgacgagctggttcggaaaatccgaatcggagtcggataagaagaagaaggaatgaggtaaatacactacattgttttcatcatttgaccgaagtgcttcctttggctgcttctgtctcttgtgtatgagcgcatctctctacttattgtacacatcatttcccacactctctcatcttctatattactgatatccactggggttagttgtacacttacactcaacctttctgaacaaattgtgattctgtgattcttcattttctgtacatattccttactcatctatctcgaaggtaatgaatgccgaccattttccaattttcatggttttagatcctcaatatcgaatacctgggactcaaattctgcgtgggacagtgttcaatgaacctggtcgggtcatggcagagatcatgctgataattcatatgtgacggtaaacccagctacaaacatcaattgaccataccgaacttgatagcgtccattggcctcgatttgagagtcggaatcgaaccgcgaagatcggaactcatcaataactgtccgggggtgtctagaggtctaaatacccgtggaacgttggtcctacctagacagagtcgggttagtgcctagagaacccatggttccgaatggagaacctggggtagacccacctttttagcttggaaggcacaactttctttttgcttttttgctcttttaattttatatcgttattatcgtcgtagcaacgcccgccactggattctgtgttctttctaccagtagcatatatttctataaagccagcaagtgaaatatgagcattcacacatcatttgccacctcaaagccctccacgcgaaccgacttggtctgatactgtacaatcaaacgagccagcttcaagcgatcttctctaccaagcctctgaaccctctgacaggggttctttacaatcaatccatcgtagtcgtgctggaattccacatcagcctcccattcatatagcgggctccgctctctaaagtaataaggccggtcatgcttcataacgacctcgtacagtttgcgaaattcttgagatcttccggtcttgatatctccatttggcagtaccaccacacttgcatgccacggcatatcaccaaataggtcgccttgccgcaataggggaatagagatcttgtttcgtcccaatgaagggtgaatcgagagacggatgtattttccaagtgtggcgttaatgacggcttcatatgcctgaaaaatcagtgagccagggaagtcagactttaagaacaactaaaacacaaagtatcccaagcaaaactccaagtgaaacttacgatgagtcggttgatcatggttttcgccatcttagacacctcagccgcgtagagtgccggatcggccgcgataagaggatcaaaccctttggcccattttaaatcctctgatatgcgactgaaatagctgttgtatgtggtcttggtatctgaatttgccttcaactcatggtcaatgtcgaatctcggatcgaagtatgtcggtgacatcagtttctccctgcaggtggggacgagacgcaggtaatctgccttggtaactctctcgccatctcctaaccccagcaagttcatcagccggatgaactgtatagaagaaaaatgcttctctttggcgattttgcgcagctcaatgccatagtcgtaatattcgtcgtcgggaacgccgaccaaatctacaccgtcagtttattttatcactgctggattgatataacaaatggcataccattatatactggtccgtcacaaatgaggataagtcgtgcgccgtaagggtagacctttgaaatctcctcgcacaagtgattcaacttcgctagacccatttcttctcctagatcagccccatctcctagtactttgtcttgatttgggctcttccatggaaatgcaggtaagaccatggttatcggctggtctgcggtgatgttcatcttcagcttgtcaggcacagagtcaaacacccttccgacgtctctctgatggccatcttcgctcgaatgcaagcaaaaccgctttagtacctcgacaacctttagaggcacttcatctggagcatattcgaatctcattgtaaatgaaatgccgaggaattgatggatgggtgcagcaaaatgggggggggggggggttttcgggtgttttnnnnnnnnnnnnnnnnnnnnnnnnnnnnnnnnnnnnnnnnnnnnnnnnnnnnnnnnnnnnnnnnnnnnnnnnnnnnnnnnnnnnnnnnnnnnnnnnnnnnnnnnnnnnnnnnnnnnnnnnnnnnnnnnnnnnnnnnnnnnnnnnnnnnnnnnnnnnnnnnnnngagggaggcggggggggggggggggttttcggatgttattgttatccctccgtgtcaagatcagcatctgattattgcagtgacatatagcttacagtattttatcagttacctgcacactatataggtattcttacatgtagtagtacccgtaatcggtaaaactagaacatagtatttgccaatttctgcagggagcaggtacatcgactgcacaatgtacgtagcacctaggagtcacattttagaattcacctctcctcctcccattttctttaatttatttttctctctaaagccttcctaaacaatatgggccagcgaaacataccacagagcagtgcggccggaatatgctcgacgaccgctggttcgtcctacacaacgtcggccactacctataacgaagagtccccgatatttgttcaacaagatcctcgccaacaagatgaataccgcaaagctgagaacaatgagatccccaatgggggtctcgtagcctggacccaggttctgactggacatctggttgtgttcaatgtatggggctacattacatcgtaagggagccccgtcacataagatattaattcaaaccattgacgcaatctaggtacggtttcttccaagaatactatgtcaaaactctcgatgtcagcccagcaaatgcatcttggatcggagcggtgcagatgttcttagtccatttcctggccactttctcaggccgagcgatggacgcaggctacctgagacaatgcatcacccttggatgtttcttccaggttgccggggcattggcgacctcattcggcacaaggttatggcatttttggttagcgcaaggcgttgtcagtggaattggccacggactcgtcttcagccccatgatctcgctgtatgcgacatacttcaactccaagcgagtgatggccgtctcgctggcatcttgcggggcagcgactggggggatggttttcccagtggtcgcgtataagtgtctcaacaatatcggcttcgcatggactgtccggattatggcagccattatcctattcaacagcattataattatcaagtttaccagagctcggattatacctcggagtcctcctccctgggttgatttcagtgcattccgtgaacgcccttacctccttttttcgatcggctcattcctgatcttcgagggtatttactttgcctacatttatgtaagttctgtcttgtttctcacattggttggcggcataatagctaacatacctaacaacatctacagctcagacaatatgcccaggcccatacaggtttcaccgcatctgactcacttctccttttaatcctgatgaacggcgttggtgttgcgtctcgaattgcatccgcatttgtggcagaccggtggctgggtgcggtaaggacttgcattgcagtctccatcccttgcggtatcgccattctagggtggattggtgtacacacccgcgttggcatgttcatctgggctacagtctatgggttactggttaattgtgcgcagagtcaattgcccgctgccaatgcatactttggatccaaagacccggaaaaatcaggcacacgtgttgggatgatcaccacgatcaatagcattccactactgactggaccgtacatagcagggcagctgatcgcgttacggggaggcgattacctgtacgcgcagttgttcggcggtatttgtatcttgactggagcgttgtttgtagtcggttctcacctttcgggagcttgaaattactatccatgcatgattgtatttgaacagagagttatgccgtgtatctacttgtctaagttactccgaggatgacgattatcaagctctgaatgaggtattatatctaagccacataacacagttttattgtttagcgtgttactaccctatctttacggtgctcgtataaacataaacataagcataaaagtgaaagtgaaagtgaatgcatgtccccctttgcaaattgcctcaactgaccttgaaacatccgagtcaacgaaaagtgtgacccgctctgtttcggaatgacctccctcccatcacgttttctccaacccctctcctcacgggccttctcctccaccaacggagcattacacaaaatggcactcaggcctcttcattaccaccttccattgttcccagggttccagctgctggacgtggcggccccactggacattctcaacattcgaacgcaataccctgacacatcagccatcaccctgactatatcagcggaaactctcgacccagtctcagtgaaaccaatcccacctcctaaggcaaaatggcgatttgacctgcccgtctcaaacatcaatacagcttgtaaccagcaaatgctaccacaatgtacatttgctgacgtgatatctgccctgaaagcggggaaagttgccgatgatggcagtggtgaattcaaacctatcgacgtgttgatcattccaggtggcccggggacacgtctggaccgtatttacgacactgatactacattcaacgaagctaaagtctccaacacgcaagaggttcgggactttctgacagctgttgcgccctatgtccgtcacagcatcataactgtttgcaccggcagtcatgtcctttcgcagactaggcttctagatggactccaggtaacaacaaattcagcccgctacgatgatatcgctaaacaaacgggcggcgtgaactggcagcgcaacaaacggtggctgcgtgatagtgtgtccaaggatgcggtgtctgatggcttgttgttgcctgggattgagatctggtcatctgccggaatcactgcggggattgatgtaatgctggagtttatttcagcgcattatggtggtatcgcagtcggagtagagactgcgaaacggatggagtatcgctgggagcgagagaaggaagcttcttacttcctgtaacgggttccccaaaaggttatcaaagttacagatgggctcaacctttcacgagccaggcttcagacgtaatactcgatgcgaatggcgaatgttccctggggatggaggtcttggcagaatatagtcagccgtgaagctagagcaattttaaacatacaacatgccatccctcaaaactccagtactttgtgtcactggtatacactataatttgtcagagagcagcgggtatttgatcggtcagtctatcttcgcgcgcccttctagagacatcctggacctttttggctttgtgatgtatttctctagccgtcaaaacaatgaaacattatatcgacatgttacatttaccccggaatcttttgccataccattgattggttctcctctatcccgatcccttgtgtaagatatacctaaatgtagcctgatgcctattcgggaaaccgcttgccagatcatgcatgagcagtcagctcaacaggtatcgacttctttggctgggagagcatcttcaaatagtcaaatagtaacggcacgtcctgtgatacggcgtatccacgggcagtatccaaatgcctaatctggatgtatggaaacagtcctacttcaaagtcatgtactagtttcagcatacaagtaatcagatggtaatcaataccactatatcctgtgcaatagcatggtttttattgaataacccaccgaagtaaagttatcagaagtacaagaataacgaggaagagggaagggggaggaaggaggcggcaaatggagttttaacggcgaataaacatggaggctatgagcataaggaaccaagagcaaagttgcaatagaaagccaccagattccaatacaagttaccagggtaccacccctataaatcacgagtacattcgaataccaaatctaccccttcccaatccctagctgccattgactttcccgctctcatctaccatgagctacatcaaaatgctagcgacaacggtagtcaaagtatctccccacttagacataattcctttcgactgtatcacccccgtcccaaagaaacgagcctcattcctccccaaaccacaaccagtcgcttcaaagccagaaaccaccaccgacactcatctcgacccaccggcagtatgttccaccttagcccgcctaaaggcagaggaaataatgaacatcgtggagcgctacggctcccatgagcgcacaaccacagccggagaatggctgggccggtcatcgtttacgccgcgtgtccagacacatgttgcagccaacagggcaattcctatggttctacctgcttttccgatgaagagcaataaccgcatggacaaggtgctaggttcacttccagatttgggggatgagcttgggttagcgcggttagtgaatctttgtcgggatatcaaggctgtttacccgcctggtgcagttgtggttatggttacggatgggatttgctataatggtgcggggttgaacccttctattgatttggatgtcagatacaggatcggacgctaatatgatttttggattctagatcttacggggatttctgatgaggaggtctgggaatatgggaatcgactgcggaagatcgccgttgagaagggatatgcttgcattcagttccatcgtattatgaatatgctgggtctttacactagcgcccatatttcaaaatcggattatgtgaagctctgtggtttatccagggctgaactccatcgacggtgtgggcggccgggttttgatgtcgataagtttttgaaaaatgatgaggattatctcaggacttataatggtaagtgtgtggctttcaagtcgagctaatatctcccagctgattcaatgcaggatatgacaagttcatgaaagtcgatctaaaattcagcccagtgactaaagattgcgccggtcctaaacaatataagaggaggatcaagattatcgcaaaagccatgattgtccgcggagtggtaagtcttctcgagagcgccatataaagcgacaaggtggctaatctctaggttgcaggaatacgcggagttagtacgtcaagtttaccccgactcactgcgtctctccattcatccctcatcggggcagacaaagctctcctgtccccttattccgcagaagaactcattttccatgagcccttggcactgtagtgtggcagtgacaaccacaggggaattcataacagctcaccaatccgtacatcggcagaagttcgaccttattagaaaagatggacaaccatatttcttccgtgagagctcgttgctttttaattgggacgccagagttgattttgagcatcattatgggcaaaaattggttgttaaggcacaaaaacagattgatcaagaactatctgactcggatttggacaaattggcacttttggcaattcaacaaagaagtgtgtcttttgtctttgtatatatctgatattttgaaggaaaattcatgttcaattgctcgtgaaggtccttgaatattgttatataatctaacgatgtaacagccatggtagatcgatatctatagccgacttttaaagggttattatcgttcttaactagttagttagcccagtgacagatagcactggtaccagtatgaaagctctcgttatagcgaattacccgaaagacctcaggccactgaagggcgcgctcaaccattgcacccttgcaactgcctgtgatttcgctcttgaaggctgtgagcctccgtatctcaaagaccaggtaatagcactatttcctggcaagcagcccagatgcaacgagctggctagctgctagaggcagggactggtcaccggcgtggtcgacaaagaagtagccgaccaagcactggcggagcctcaagaagacaacgtgcatcccctggtggagaggcttatggagcgtaatatgctagtatgtataatgagcccccagctgatacaatcaatgtatgccatggcgctgagtctatgtagtaatgagttgttggaaggactaagagtcctaaatcgaacatagcaagtctacactataatttacttcgataagacaggtttagaaaaaatgagatatactcgtcacattgacgggctcacgtccacatctacaaggccatacggcacctggcacatttcatacatctgtacagaaacgcagaaacgcacgaacaaaaagcttaagataaaacacagcgagacagggagtaatggaaggagagggaggtaaggagagatagggaataagcgtagggaaaaaaagccattagctgtcaaaaaggtaccacccagatccattattaatgtgcaagtccaaagactgaatgaccaatagttcataagagagagctttcaagtggaagccaaaagtagtgaaaagatttcgtcccaaatttggttgtcccagtgccattgaaagggataaaaaaatatttggtaaacaaaagggggaatatgtcaggaaagaaaaaaatggataacgcgacacatgcagcgacgaccgatcgtcgctcggagtatcatgttgagaagaaaagtggccggtcaaaaattgcacagaaagaagagatacgtgatatgtgacatgtaaatccttggcggatgatagacaatgaaaatgaagatttgtgcagtctctctgtccaaacctctcttggagagtgggggagagcatgagcgcattgaaaggagcagttatctcagaagaaataagggtcctcgagggcccagtgccctctgattgtcatcgtgggtccaaaaggaggtgggatatgatggaaggagcggtttatacgtcgtattgtcaaaagcatatctagttccatcccaaagaattctctgccataacgggagcactgatcatctgtgaacgagcagtgccacggctaccttggctgggggcgcgaccaccggaagcaaacatcgaaccagcggcggagcctccctggctcatctgctcagcggtagagctggagcgctggtgcagctgctttctcttgcggtagcggcgggcaacccagaacatacccgcaccgtaagcggcagcaccggccacaacaccaactccgattcccacggagctagccttagccttggagcttccggcagagccatcggtattgtcgctagtgccactgtccgtgccgtcatcgctgccgccattcttgatactgccagtcgagtcgctttcgccactggggtagtttccagagaactcgaggggaattgtggggtcaaccattgacatcaatgactggatggattcactagcttgggtgtagagagcagaattggggttaactttaagcgctttcagggcatcgaccttatcccgagggaaatagaagatagcaatggtggcgttatatcccgtggactgccagttatagtaaggctcaatagcaaacataacagggctgtcctgagcagagaggtttggcaaagcgttctctatagcctggggggtatagttgaagatctgcgacgacgacaagggtgtagttgcaacaaatgaccagggcagctgactgttgaaaccaagctggagcagaatagagtcagacggagcctcggtgacttcattcgacggggtgatagagccagggagcgatggtggtgccgtgggcttcgcagtctcgccggaggtcgagctctccgtggcggtgacggtaggcacaataagaatagtcgatggcatccagtcattgtcgttggaggtggaggtggaagtggaagtggaggtagagagcgtaggcatctctgtcgtctgagactccacggtggtcttagccgtgctcgcttcttcgctcgtcgtcgaagacgacacgggaagaggaatgtaggctgagtgagaggtgggggtgggggtggaaaccttggagctctcgtaagaggcactacccggaacagaggcggcggtggtagtagtacctaagaaaggagcccagatactagaaccagagacagttgcggattcagaagtagaggtagaatcagatccgggcgactgtgggacaggaaccgatcccagggtcttggtcggggtggggatggcaccagtgttggtacctccctggccaggaatgagagcagtcgacttggacggcagaagactaccatttggaatagacgcagtcggaatcaaagcagtgctaccagtgccagtagaggtgacaccaaggacggaatccacgcttgacacgagactgccgacgagatcaccaggagttgtagttccagtgggggtgggggtggctaacggtgagctagtagcaaacgcaggcacgctgactggaatggtaggcgaactatacgggtcggaggacacagtagcacttgtgctgttaccggtggaagacttgtcacccaaacccaaaagggcagaaagatccgaccccgagcttgccatgcttgaggctgcactgctgatcttgttggcgctagaagatccagtgggtgtcgcagacacggaggttgttgattcgccgagaatgccgcccaatcccgaggttaggtcaccaaggacactgtcgctggaggatgcaaaaggagtagaagaagcagacgaagttaccttagctgataagtcggagacgggggtagtcaaggatgtggaaccacctccgacgaggttgcccacattcgaggtcaaatcacttaggagaccgccgctagatgtagcagtagcagaagaaataggcgaagtgaccacagctgatgagccggaggcgggggccgcagtcgaggagatagaatcaactccgaggatactgcccacattcgaggtcaaattactcaggagaccgtcgctagatgatgtggtagcagcagcagcagcagtagaagtaggcgaagttaccacagccgatgagccggaggtggggatcgcagtcgaggatacagcactactgcctaggaggttacccacattcgaggtcaaatcactcaagagactgtcgctagatgatgtggtagcagcagcagcagtagaagtagccgaagttaccacagccgatgagccggaggcgggaatcgaagtcgaggatatgaccgcactcgaggatgtggaagtactaccgagaaggttacccacatccgaggtcaaatcactgaggataccaccgctagaggatgcagtagcagtagtagaagcagacgaaggtaccacagcagatgagtcggagaccggggtcgtagtcgaggatatgaccgcactcgaggatgtggaagtactaccgagaaggttacccacatccgaggtcaaatcactaaggataccaccgctagatgatgtagcagcagcagcggcagcagtagaagtaaccgaaggaactacagccggtgagtcggagaccggggtcgtagtcgaggatgtagtcgaggacgtagtggcagcagcagcagcagaagtaggcgaagataccagagccgatgagaccggggtcgtagtcggggagatagaatcaaccccgagtatactgcccacattcgaggtcaagtcaccaaggataccatcgctagaggtcgtggccgaaggagacgtagtagcggcctcggctgatgagtcgaccaccgatccctgctggctcgtggctcccgcatcggtagatgcggcctcggagttctgcgtactcgtgttctcggtgctcgaaccctctgtctgctgcgtagtcgtggtagtggtgctagtcggttcacctccaatagtcgtagtaccagtgatacgatgggtgatctcggggttcttggggtcgatcgagatggtcacaataaccacttcctgtccctgctggggctgaacggcagccgaggattcgggggtggtttcgggggtgggcgtagccgtggatgaagaaacttgggtaggaatcacgttgtcgaagacggcatcgaagattgagccaggttcgggctcagcgtttctgcgaatagttcgcttgacttcctgcgggaagtaccaacggggtcgctgaacgtgggcttcgggggcatcttgagctgcgacgagctcaagaccgcctacagcgaggaaggctgcgagaacggagatggcgtcgggacgcatgttggacaattctgtacgtgatcgctcagagcgggtccaaggtcagtgtacaaaaatgcgataaccaccgtctgtcaacacctcatgaatgatcagggagtgtgaccaggaggtagagtgcctggagtattcgagtttccaacacaaccaagccccgggcaattgcgataaattcacaatgtcaagattattcagagtatacaacgtctcgatggcaaccgatgagaccgaattggcgcaaacaataactcgacgataaacgaatggaaagggggatttcgatcaatctgaaacgacccccagaaggcgaaaaaaacgagtgtgggcttagaaaagctgtaaggagtgaacgacgactttctgtagaaccgtccgggcaacgaggtcaaagaaagtgaaaacagaaaatgcgggtgaccgatgcaaggggagagtagcccaggtcaacgcgaacacagcaaaagcagacaagggagagaaataaaggagtgaatgagtgaatgaagttgatcagagaagaagaggatcacttcatcattaggggggggaaaggtggaatgggggggcgggacacgttgtggtagcgtcaacaagggtaatttacggtaaattacaacttttagtgtatttaacgagctggtccgggcgtttggcaggtgcgtgggatgtggccacgcacttgcccctgagtgtagttcttagatattgaacttgatcctattccaacaatgtagtaagtacgttgtatgtttaatagataagctggtctgattatggacatctattgttgtaacaacatatttatacctatttataacccatttggaacctctgaagtcaaacatattccaagaccctcatatgaaaccatactaaacactaacctgccgatatcagccatttaggtacggagtcgtctagtcagtatttcgtaaataacggcaatgatggcccacgccatgcagaaaaccgaaatgaataatgaatgctcatgggggaagaatgagtctgttccctataggtccacgaccgctttgctttgtatatagtacaagtatatctgagccctcttcggcatttacagtatagagactgatgtacaggtactccgtactcggacgatatttcccttttcttctcttttgccgttacgccgttcacccgtgcaacaataatatataccattggaatataatccggctattgcgaatatcgatcgacaatcaaaaagcatgataagatggtaaatcaacagatatgactcgagcgtacccaactcaacccatacaagattgcacatataccttatgtctgtcagatatgaagtatagagtagacacataaaatccgaagaatgagactattttcgcgcaatgtaatacaatgatgacagcacttaatttcgaatcaaacccccccgaaaaaaaaacataaagtccgtgttaggatctgaaagcgtttttcatttgaggcgatcaatagccccggagaccattgacgaaaaaaatgccgaattgagtcggggctaaacccacctaagccgcggatcacaatataaaagaaggaaaaagtgagaaaaaggcgccaaggccaaagacaattccgagcaaagttcagtccgtcgcaggtctagccccggaggcgtcaactaagtgggcccttcccacacacgtacctgagcgtggagggaatccgctcaagtgcgtggccccaattacacgttaccaccattagttgtggctcaagctcgccagtcttacacacctacccccttctggcttaaacccatcaaagaaatctcgtgtagccgccgttaagaagtacggagtacggagtacatacggagtaagagagctgtccgatgaacgagccacaagttggtccttccatttccaagtctcgtgagacatatataattgtcgtacttggctagcttgcgagttatacaactatgctgtgcaacaccactagtactagttcaatccactatggaagtaggggatgagccctgactcaaaattgggttattagaacgagggtatattaagaaatgtttcacactatatcgatggttaaggttttatctctagaaccatagactaataaagattagctgatacaaacacctgcccatacctatattgtagtgtacaacatattctccatatctgaagctgattgaactgtcaagtttcagaatgataaaatacaccacgtgcccccatcggaatggagggttggcagctgcgatttcccctcattcttgctgtcattttcaggtgctcagcattccttagtgcgtttgagattgtgctaactaatgccaagtggtataagatcaacgaagccaaggtctcgctagaatctgtttccctctcctattaccctaagctcttgcctctttagctttgttcaagggcttctggctgcatgcaccctcgagatcgagaagcctttaggaatgcaggaacaaaggaccgagcatacaagcatatgcgagagccatggatggtccacgggtttaattatagttaaactcagccacattctctttgttggacctaggacatactccaggactctctactccgtatcacgaagatgtgaacaatatcaagcgtccacggatgctcccggcatcattccaagggccttttatatgttgtgcaataaacttccaggggttcatcaactgtaccatggacgagtgcagacgctagtcctgttcctgagccctacagttccagtctccacccttcacccttggtttcagcctgtatgtattgaaaagtgttgaacgcaagttacaagtttccaatgccaagaataccgtaatatttccaaccagactgtaaaatatacgtagatcatgtgaccgactccctcgcacatttgattcttgtctccggtggagagtgtgacgagagttgagccatcaaaagactccaaaagtgccatgaaacagtccaggtggaggtgtcggccctatacattctccacatcatcgtcatcccctgcagtcccgctcaaagtctagaactgcgtccactgccaggctttgtgactaggccagaacactcgatttcgacatccgatccctggggaagggacttgacggcaacgcaagtacgcacctaaaagggccaggcccaatgacaatgagaaacggtccacttttccgggaaaagaatataagagaaagagagacgaattccagactggatcattttctgtagaattcgaatctcgttcttttcgagcacagaatacttaccggcttaggatccgagaagaaagtagcgtagacttcattcacagccgagaaatcagccatatccgtgaggaagatgttgaccttgactgcatcttggaggctcgaccctgcagcctctaggactgcattgaggttgcggaggatttgtcgcttttcacatgttagaaaatatatcacaaatcaggcttcgcgtctctcatactgttcggttctggatgcttccctccaccatttgacccgtggtcgggtctactcccaactgaccagagcagtagaccatgttgccgacgacgataccctgggataggattgggggtggggtgggtgcacccttggtactaacgggggtacgtgttggcttggacatttttgaaagatgtgagtgagaatgaattctgtcagaataggatcgagaggaatttgttgagagtagtccaaattatctggccccagggacgttatcgattagaaatccccacattgaccgacttcccgaggtcggagccctctggagccctcttgagcgcccttgtatgttgtaaagcacaactcccgataaggagattcttatagacggccttaaagccggtatatactgctatatatatagatggtgcctggccaggatcaccctctcatagtgctcttttagatgtctatatgtccttatcaagtatatgaggttaaggtgaagactttctgattaacgaggtggattaatggagtagaaccatgtaggtagcgagacaccgcataaacctatgatatagcttcacggtggcagatcatatgatctctgaatatagaaaggtacttagatggtgtcatggtgcgatcgtaagtcatataataggtattaagaatactatagggatatcgtacttaacttatacaagctaattgagaattgcagccaggtggatatacccgaagtagctagtggggagtgtgaagagtgtgtccgtagtatttctcggaatatgttgtataataatgcatcactttattattcttggcgagagcaggatcacccctcatagcaacgagacatttctatggtaccataccacctcaaataacaaggcgggagagatcgtcaaactcacgggaggagatatgattgcgccagaagcgcagaccctcaattccttcttctcgacagagaagcccccgatcttcagccatctccagctcttcggcagccaccccgacgctccatttgaaccgatgcgcggcttcttgtgcagtgacggcccgaccaaagagagaccaatcccacgggacaggatcgctaggcggaactcgccggagctcctccatccaggcctcgagtttttcaatggtcttctcgtcactccagtcatatcgctgtacaacaagaagaccgcttttgaatcttcgtagacgcactggtaacttgagcttctcccacagctccgctgctttctgaaactccgaaggactggtcaattccactccattacgggaccgattgaaaacagcccagagatcaattagactcataatcccaccttcccgctgcaaaatgccttttcggtcatcagtgagatactcggctaggtcgcgcgcaagttctgataaatatagactttcagacccagaactaagcatgtctttagttgtcaccatcccgagagccgcagcggactcagatagcaccacgctggtttctggagagccttcgttagtagccatgccagactcacgcgccagggtctcggccagcgcaacgatctgcttggcggaggccatcaaagcctccaggtcttcaaaggcgttccctatgacctgctcgtttttcctccgggcttccagccctcggcgttctaaccccgcgataccaaccccggagtgtcgtggtgccgagggtataggactttcaacgctagcggcaggagagggtaaagctggcgaggaggcggtttgcgacggcgaaggtactgggggcgcattttgcaaaagccattttctttgaaccaaggcccccttgagtctttcatggaatgtcttatcaccacctgcacgaaatgaaagtttaatgctctcactaatttccgtgttcgcgatgtgcgattgctcaaataatggcgcaggagagtccacacgattagcgttcgccgaagagccagcagatagaggcgctccacaaatctcgcattccacaagagacggatggttcacaaaggtacaccgcctacaagacacagttcccctgagctcagaaggcgatagagacgtgttggcatttggttggcctgtatctcgtgtagtggctggtgatgcaaccgaactcagcaatgtagactcccggcttgttgcagcactgatcgccgctttgagaacggtcgtaaacggtggtttaatgccacatgctagacaaggaggtaaatttgtagccgcactagccgttgcggggtcgaaattggacggaactgggttggagaatgagcatatgggacagatccaagtggcattgattggctttggagatggtgaactctgtgagaggttggtctgtgggaggtgagagagtgactgcgttgaatgaagagccgattgttgggctacagtcgggctagctgttgcgctcctcgactgatcggccttcttcttctgcggtttcgggtatatgatgagcttcggagatgacttcaggaaaccagccttgaatccatgggtttgttagtgattggccaaaaataaaagcctcgaaagcaagatgtatgcatgtcgcacctgagactccactctatcgatttcttttagatcaatagccactgagtactttcgcgggtcctcggccgcaacatagcacactctgtgagatgtgagataggcatggccattttgataattctggattttgtatttccttttgcctctaatcagcaccccgcatcagaagctcaccatgagctacttacccttcatacaaccccaccgcatcttggacaaagagaaggatctcatcaggtaatagcaatggtctgagcgcagtagtcagatccagcgacttgaagaacatctagtaggttcaaccagctcccagcatcaaggagatccataaagagtcatgtccaaggcgattacgataacccgataaggcgggatgcatccgtagtcggacaaactaaagtccggtgagtaagcgagtatccctcaccgtcacgagtctgtgtggacttcactctcaccctccccgggctcgtgaacatctcatctcgtcttggaaataaacgttcatcaactgttctcttctctcaaaacagtaccagctgaggagtaagatcaagacttgattcttccagcagttcctcgattcctgccccttcgtagctcttttcattcttacatcttgtttctttgttctctttcaaatcttgcatctacgatgagttccagcataccaccttggcgttctaccacaccaggcacaatgtctagtgcattccctccaagtggtaagaaaaatatttcaactcaagtctcgttgctctggtgtcaggagactaacaacctgacagcggctccagcatacactccagtccaagcgcgtcgtagcctcgcccatcataccaagccaacaaatggaaccgttcctaccaaacccactcagtcggcaccaccggatacagaagcccgggcgcgagtggagttccccccacccgtacgctcgtatgtgcaacgctgttttgctcccgaaaatcaggttgcaagcgtgagcattcctgaaatgcaggagaagctgaggcacgtcattacggaggcggcccagaatgacaagctgggattgatcgactgggaaaggctacctttgccccaaactatggtgcaaaatgaacgcaacaagatcctggccaaccccagctcttcaaactgggcgtccagccacccggcttctccgggagatgccacacggaagcgaaagtcaactgatggccaccaatcggaaactggatcgccgccatggagaaaagctaaccgcaatcgttttgaagatcgagttactcaccctaccacagagaaaaaaccacgcataacactggaccagtctagtaagtccaaagctaatttggagatgaggaagaagcgttttgagggaattggggctagcgggaattctccttcttctcctgcagaattgccgatgcgtcctgctgacgtggatcacggccccgttgtcgggcgatgccaaacattggagaagaactacttccgattgacatctgctccgaacccggacagtgttcgtcctttgccggttttgcaaaagaccctggatttattgaagagaaaatggaaggacaatggcaactacggttacatctgtgaccagttcaagtctttgcgtcaagacctaacggttcagcgcatccgaaatgaattcactgtcgtcgtctacgaaatccacgcccgcatcgccttggaaaaaggggatcttggtgagtacaaccagtgccagacccagctacgagtgctgtatgcgcagcatctgggaggacacccgacggaattcaaggcctatcgtattctctatttcatttacacacggaactggacggcgatgaacgacgcactagccgacgtaactgcagaagataagaaagacaaggccgtgaaacatgctctgaatgttcgctctgcccttgcactcgggaattaccatcgtttcttccagctataccttaataccccgaatatgggagcctacctcatggacatgtttgtcgatcgtgagcggttgagtgctcttgcaactatgtgtaaagcgtgagtctcttgatttcgcatgttctgtttgagaattctcgctgaccttttatcgtagatacaaaccagatgtcaacatccgatttatcacagaagagcttggatttgagtctgatgagcagactgcacgttttgttctagacaactcctccgaagaactgctggcggagagggacggcgctgtaaggctgttgacaggcaaagcaggcacgctgttcgatcaagccaaagaagcggcacaccgtatcgtcgatatcaaaggccagatctaaccaagttctcattttccatctctttcttgcggcgaggattaaaccattggatctcagtcaaagccattttctcattttcttgattttggcgtatcttcaaaagcgggaaggcgtttaccacatacgtgcacatggatacaacataacctttcgagagtcgattgcacattgacatagtaaatacctataatatccaatctatccagtacttattccatatgcacagttctgccttgtatgtcaacactcgccttcaattgcacatcacggtagtattaggaagtgagatatgatccacgtgaggcgagtgagcaactctggtcgagaccttttttgtgcgggaacctgccaagcacgtacttcgtagggtagatgtagatgtggccaatgatcgacattgaacagagtttcttcagcttgccagtgccttaatataattgttttaacttttcatccttgtatctaatattcgagagaaaagtacggagtacggagtatcctcacacggatacagtcggcagattgcaggagccgcgcattcgccccggaaatctaaaattttttaatattagggaattaagcccccaatctaggccctttgtttctgatacatttttcatatccattttctttgttcggtggggtatgcaggtaggtgctccgtacatatccagcctaaattaatttcctgaaaaatcattaaaatagaaagatcggaacggcttccaatgggagacaacaccaaaatccacggtagaggtaaactttgtaggtcaaccatggttacaggtggggaaatgaggggcaaagatccttctttttcttctttttcgttctgtgtacctaccctttctagtacatatttacctgtatgtataactctgtatctacctatataggtaagatggatatatgcatgtacaattaccatgtacaatgatatatgtatgtctcgtactagtcaaggtcccacgggtacctatgggagatgacaaatggggagactcggacagaatcgcatttagtctagtagggtgtgattcaattacactagccgccgatggtggattatcatttgtctgcccaacggcaataataataaataaatactagagctggcgaatatattctaatggttctaggtacgacacctgacgatgtatacaccgaggctcaacccaaggttcagggttggcgttatcctgtattgccatgaccatacgatattgcagataaagatcaaagcctacatgcatatggagtactctgtatagatcctgaaatacccagaataccctcaagaacatcagaagatcccaaagaaagcaaaaaagcaaaaagcgggcccccctggcaatcatccaagccgcgtggttggaaccgcaatacggattacgctggtcaaggtatatacacctgggcatttgactaggccttgctcctcctttcctcctctttgcatctctccttgaatcccttcgccctcttttaccatgaaggtgagtttccctcgttccgcagtatgacctggtatcgtgtttaattaatccggtttctaaaaaaaaatcaaattccaaggcctttagacgatctctgaagggggagaaagatcccaaaccccatcatatctctattacacccaagtccgctattgcgattctacccccgaaaaaagtgagttgcgtccttgcgcaagttcgccagttgcgttgaaattcgccgctttctttgacccctcgcccctccttgtcccacttccgactcgttcttggcagtggctgaccgcatttcccaggtaatcaaagcgctttacgactaccaaccggaggggatctcgcaggaattggcattcagcaagggagatttctttcacgttatcagcagggaggacgattcggattggtacgaagcgtgcaatccgctgatccctagtgctagggggcttgtgcccgtctccttttttgaggttatcggcaaaaacgagagggatagtgggggttccggcgacctgtccaaggaccaccacgactcaggattctccgaccgcggtcgttcccaagattcttccaccaccaagaacggcgcattcagaatgtctgcactcaagggtcaaggcgctatggtctacggagttgtccagtacgatttccaagcggagcgacccgatgaattggacgcgaaggctggcgaggccattatcgtcatcgcccaatctaacccggagtggtttgtcgcaaaacccatcggtcgtctcggcggcccaggtctgattcccgtttctttcatcgagttacgtgatatgcaaagcggacaggctgtggccgacccgcttgacgcggtgcgacgcgccggtgttcccaaggttgaggagtggaagaaaatgacggcggaatacaaaaacagcagtattacactgggcaaaattgaccctggtcacggtgggggcaatatgacggctgtcacctcgggcatggataagatgtccatgggccaccagagtcaaatgagtcaaaatgacaatgtttatgtatgcaaactttctggttcccgtttgcgattactaaccgatgatgagcaggagcaccaacgtaacgccagcaagggaactttgtcgcaagtgcccacatcgcaacagagccaacttctcgtccccgtctccgcctatattccgcgctactgtttcgataacgacaagtattggtacatcatcgaggcgaagatggaagacggtcgctgctgggagctgtcgcgttactaccacgatttctacgacttccagatcgccctactgacccaattcgaagatgaagctggcaaccgtggccgtgggcgaacgctccctttcatgccaggccctgttacccacgtgacggatgcgatttccaacggccgacgacagaacctggacgaatacatcaagaagctcctgtctatgcccccgcatatttcgcgctgtgaactcgtgcgcgaactcttctcgccccgagaaggagacttcgaaatcgatcccaatgcgttcggcgaggatgcccggttctcgggtggatctcagcactccgtcgtggatccccagcaaaccgtgtcgcgccagtcttcgcagcagcaaatcaatgcatccaccgagcgggtatcccagcagcgcgccccagcacccacgccctacgccaatggtggcccgccgcccatgaaccgccaacctagctctatcacccaagcttctagcgcatcggccaacagcgcgatgaaggtcaaggtgttcttccaggatgaccttattgcgatccgcatcccatcgggtgtgagcatgcagcacctcaaggacaagctatgtgaccggttgaagattcaggacgatatcgttgtgcagtaccgtgacgaatcctccggctcctatatcgatctctatactgatcaggacctggagaatgccatgcaacggaacatcaagctgaccctctttgtcagcgtcgcataaaaagcactcacttctttcctggtgttgcggtcaatagacttgcccatgatttcatcgatgaggttatttattgtcaacctcatattaatgtttgccacgagtaaggttggtgcattggagtttttgaatgacgcatggttattccttgatttgtttttttcttctttttcaaactgatcatcagttctttcagcgatttcacatagtccatgaggacgagatcgtgatttaacgaatctgatgcgagatgtatggcacggtttccttcctatctgcctattttctttttctttctatttcttgttcctgcgatgtggcattatgggctttcttctatttctgcgtcaatttcgcatcagatctacatctcatcctattcaggatcataccccggtctgcctgcttctgtgttgtgtacatatttttcttacttctcgtgcatataccggggaggcctttttcatatgggagaggctcaaccgtggtatctcacagctctttttgcaccagctataaatgttgatatacattatttgagaatattagaatcgttcgggtagagatgtcgccatgatagaatatcacgtgacttgctgacttgatctttgtcctgatttgttcttccaaggttcgattcttggaatgttattctggtcgtggtccgtcacaaattttcaccttgaatcccagagctgcaggagctgtatatatattttctgtgcatgttgtaattcggcatctttagcccgggcgtttggcttacgaggacccgccaccactccagagctatccggaggaaaaacaaatccttgcctacaatacaatacctcggttaacgccttcgcatcgcaaccgctctccgccagggaaacccgacctctagcccaccgtcgcacccgcaaatataacttccaaaaaacctgccaatgagccgcccatcggcaaagctatgcgcggaatgtttcccaaacgcgctgcgggcgcctcggggcctccgccctacaatgttgcggggcgtcgctcgtagattttatgccacacagcagagggctctcggtacattacggcggccgagtcgatctccgttggtatatgtctctccggagaggatccgctcccagccggccattcagtcaccaaagggccgaggtctggctacagtctcggacggcgagaagaacgccgctcctacgccacgggatgggcctatgagagaatatgatgtgcgtgtgcgggatgggagactgagagatgacgaatatcagagaggtaagttgtgatcaactctggcgcacatattcaagctgacatgcgccgatgctctagggatcatccaaaatctgcaggacctcttcgaggcactgaaagattaccaccagcctaaagttgttcacccagagcccgagtctctgcaccctgaggcaacgtcatctttcttcgggtctttgttcggcggtggcgtgaagaagcacgaaaagtccgctgtccccgataaccttccgaagggactgtacatgtatggcgacgtcgggtgcggtaagacgatgttgatggatctgttcttcgatacgctaccgccgaacatcaagagtaagacgcgcattcactttcacaacttcatgcaggatgtacataagcgcatgcacgtagtgaagatgaagtatggaaatgacttcgatgcactgccgatggttgcggccgatattgccgagctctcaggcgtgctttgctttgacgagttccagtgtacggatgtagccgatgctatgatactgcgacagtaagtgttcgattcccggatggggccattcaataacccagctgatgatttgccaaccaggcttcttgagcacctcatgtcccacggcgttgttctcgtcaccacatccaaccgccatccagacgacctgtacaaaaacggcattcagcgcgaatccttcatcccatgcattaacctcctcaagaccgatctgcacgtcatcaacctcaattccccaacagattaccgcaaaatccctcggcctccagctgccgtctattaccatccgctgggcgaggccgcacagcagcacgcgcagaagtggttcgagttcctgggtgaccctatcgatgacccgccgcatgcagactcgcaagttgtctggggccgcgaaatcaatgttccctgtgctagcggcaaggctgcgaaattcaccttccaggagcttatcggcgcggccacgggtgcagccgactacctcgagctcgtccggcattacaatgcattcattgtcacagacgttccaagaatgaaccatacccaacgtgatctggcgaggcgttttattacctttattgatgcggtatatgagagccgggtgagtaacgagcaacgttcctgttcacctttttaccgtgcagtcaactaacaacccccttcaacaggccaaattagttctcacgaccgaagtacccttagcagaccttttcatgtccgaacctgatacgaagaaaggctctaaaggtgacggtggcgaccactcagatctctccgatgcaatgcgcaacctaatggacgaccttggtatgtctgtgcaaacgctgaagagcacgtctattttcagtggtgacgaggagcggtttgcgtttgcgcgtgcgctttcccgtctttctgagatgggaagtaaggagtgggtggagcgcggatcggcgcttgaaaggactcctgcgcagaataaggaggatcgggaggcttggcaaaagacgaggagtcattggagtgaggataatatgtagattatattgttctcttgcctttgtcctcttgcctttggttcttgccttttgttttgttcacacgctacactgtgctgtagagatacctgtgcacatagatcgagtttggtgtaaatagcatagctcttctttcaattatgaattatccctatggattgaatttgttctgctcctcaaattgaacctacaacatatattcgggacataaatctccttatatcgactgtcagctcaattcctcatatattggaatttggagatgcgcggacatgttttccaccctgatatcaggtgacgtcacgtcgcatccgaggacaagtttgtatggtatttcaagatccctaataaattcgaggtccgaatccaggcataaattcacgtcatcggcctgcaatcagcatgactccaccataccagtgccaataccttgtattgcctatggaacccccaagatcgaccacccaggcaacacaggcaaaggttaccaaactatggctccacctccgtgggattgcaggaaactgccccgcgaatgaaatgggagcaattcgcaatgtttcttgtctattctgctccattacaggttttcctgtcggcattggttggtaaagtgcccgggcgttaggttagggtatgggtggtaggtcatactatggtcattcttgcaaagcggttattccatcctggttaaactttggcttgggcaatcgactttccgctttgtaattagacgacttcatttcgttggtagatggacttcaggatatgcaacggggaattacatcattgacgtcgcacctagggaattgcacgatgaccagcttgattttgatatataaagcggaaaattcagccttacctatgctactctttcctctctttctctggtattattgatatcaaccacacttattatggcagcaaagtcacactccaagactgcggacggcaaatttgccgatctacaaaaggacaccatcgaagtcaacgacaagcagcacatgacaactgacaacggcgtcaaaatctccaacccagaccaatggctccgcatcgtagacgaaaagaatcttgggccctcactcctggaagatcagatcgcccgcgaaaaggtatctataacttacattcatccacatatataccaatatatatctaagcaaactaaccaacaaacaatagatcacgcgcttcgaccacgaacgcattccagagagagtagtacatgcgcgcggaagcggcgccttcggcacgttcaagctattcgagagcgccgaggacgtaacaaccgcgggaatactgactgatacaaagcgggagacgccgctgttcgtgcgattctcgactgtgcagggtagcaggggcagtgcggatacagtgcgcgatgtgcgcgggttcgctgttaagatgtataccgcggagggaaactgggatatcgtcgggaataacattcctgttttctttattcaggactcgatcaagttccctgatgttattcattctgttaagcctgagccgcataatgaggtgccgcagggtcagagtgcgcacaataatttctgggatttccagtatctgcattcggaggctacgcatatgaaccagtgggttagtatttctccctatttggttgtgtgtcgatacctgatagctgatgcggttcgtgatagattatgtccgatagagctattccgcggtctctccgcatgatgcagggattcggcgtgaatacctattccttgattaacaaggccggcaagcgtcatttcgtcaagttccacttcactccagagctgggcgtgcactctctcgtctgggatgaggcgttgaagatcggcggccaggatcccgacttccaccggaaagacttaatggaggcgatcgaggcaggacacttcccacgctggaagttcggcctgcaactcatccccgaagaaaaggccgacagcttcgagttcgaccctctcgacgccacgaaggtctggcccgaagagctcgtgcctatccgctacatcggcgagatggaacttaaccgtaacatcgacgagttcttccctcagaccgagcaggtcgcattctgcacgagtcacattgtgccaggcatcgacttctccgacgatcctctgcttcaaggccgcaacttctcatacttcgacacgcagatttcgcggctcggaccgaattgggaggagctgcctatcaaccggccagtatgtccatacatgaacctggtcaaccgcgacggccagggcagacatcgcatcactaagagcaaggtgaactactggccgaaccggttctctgcgaatccacccgcgaccgcagagcagggcggcttcgtcagctacccggcaaaaccgcagggcgcaaagaagcgcgcgctgtcagagaagttcaaggagcacttcaaccagccgcaggtgttctacaactcgctctcaccaattgagaagatgcatgtggccaaggcattctcattcgagctagatcactgcgacgaccccgtcgtctacaagcgcatgtcagaacgtctaacagccatcgatctagacctagccaagaccgtcgcgaagaatgtcggtggcgacgcacccgtcaaagcctccaaggaaaacaggggtatcaaagccaagggtctgagccagcttgaattcatgccggagaaacccatcattgcgacgcgtcgcatcgccatcctgattgctgacggcttcgacttcaaccagtacaccacaatgaaggaagtgctcaaggagcgcggcgcgtttgttatcacagtcggtacgcagcgccagggtgtgactgccgagtctgggcagaaggttatccctgaccacttctattctggaatgcggtcgacgctgttcgacgcggtctacgtgcctggcggaaagcatatccaggcgctgtcaaagaatggcgtattcaagcactggatttccgagtctttcgctcatctgaaggctattgctggcgccaacgaggctgtgccgtttattgagcggcagatcgggctttctgaggtcgaggttgcgaagagtggttctccgctgaaggagtcgtatggtgtggttacgggccatggagatgcggtttcgttgttgaaggttggcacggtcgcgcccgattcgaagggtctagctgagcaatttatttggcatgtttctcaacaccgcaactgggcgcgtgagctggatggactttcagatcagattgctgcttaagtcggtgttgcatgtgaaacgaattggatatgtgaccatcaaaattgtatgagcttttttttggttaaatgagagctaagtcatttcatatttctaaaatttaatcaaatttggtaaaagtctcacgaatccaaggccgtgtaggtggatctcacattcagatgctatgggtatgatacactgcgtatgtaggtggccagcctacattcttcatcggctgatctacaatacacaaacccaatcataagctcatgtagggttggaggaaatatgtttctgcaagattccatgctatcaaggccctctgccagattcttttaggccaacgtagcgctagcacttagtgcctgtgcctgcgcctgtgccgaaccctaacccttcccatataacataccccaaccgccagtagcaatgatataccaccattatagagacatcgaacaattgaaactagataaaccccaaaccctccatcatactcagcctcccgcataccacatccccatatctcataggggtcagggctactggtcacatttcaagacggattagttacactgcaggaatatcggaccagccgctttctgaaccaagagactctggaaggcagaagtattcatgatgtcctttcgtaaataacaagctatgtttctggattcttgttccattatatctttgatattggatctccgcagtcatggttcttcatctatcgcgctcgacacggctaagcgttgtgattggcatatcgacatgtttctttctagctgagatttcgcgttggttgccctttcttggtttctgtggtactggtcttggtatgatatcgatgtgctgataccgggctagtgggcttctatacccattctattgctctgattgcagatgctttccactatgtaagcgtgtttgggtgtggagttggagattgtgttggttaacatatattgcagctgaatgatttagttgggtttattattgctcttgttgcattgaaggtacagtctggtttggccgtcggtgtggtggtcatgctgatgtgaaatatagaaatccgagcgcagtgactcgcctaaggagctcacctttggttggcagcgggcgcaactgctcggtgcctttttcaatggtgttcttctgcttggattgggcattagtatatttttacagtccattgagcgatttatcgctctacaacgtgggtgctatcgcccaggctggattttgtctcatttgattatgactgacggtgcgtttagatattcacgaccccaagctgatgttcatcattgggtgtatcggattgggcctgaatattattagcgtagtctttcttcacggtagggttcgtggggtcatttttagtaccatgctaacagtacccagaacatggacatgatcatggacatgaacacagtcatgaccatagtctatcacccacgattgagacaccggttcttcacctcgacgaggaataccttgattccagcaccaaggtaaactgcaacaaattgagcgatccaattaatggagaccgactgacacagcttagcatgacgatcacaagcatcttcatttcgaaaaacatcgctgtgcagactcaggcggccacagccatggtcatggcggccacgaccacggtgatttgggcatgatgggagtgatgatccacgttatcggcgatgcaatcaataacttgggtgtcatggcggccggtctggtcatctggctcgctgcaccctatgccggccgatactatgcggatcccggtgtgagcatgttcattgccatcctcattattctatcgtccttccctatgagtaagtgtggtaccagcatgaatggttgaaaaggagatagcgaagctgacactcttcagtgcgccgggctgggatgatcctgctagagagcgtgcccacaggggttgacatgtgcgatgtcaagcacgacctagaaaaggtatttccacctttcatcttctctttcttcattcctaacaatcgccagatcaagggcgtcaattcaatccacgaactccatatctggcgcctcaaccaacaaaaaaccctcgcctcagttcacgtcgtggtgtctgaggactcggtcgaggactttatgaagacggcgcgcgtgatcaacgagtgtttccacgcctatggaattcactccattacactgcagcctgagctgtcagatgcagttgattcgcaagatggggcttcgcaggaatcttcccggtgccaggtcatttgcgggactctctgcgaacggttgacttgctgcggatagaccagatcccttctcataatgtcgagatggctaagttttggatatcaacctgccaagtggccgagcagtaactcggccatcgcattcttccttggtctagtggtgatgatttccgcttgtcattaaaaccgataagcgcgggagaccggggttcgattccccgagggagagatttctttttttttttttcggtttagacttgtttcattaagcttacattgaacaatggatgggagcttctattacgcatagaactgacgcatttaggctgacttatgatggccatattttcagcaagaaaaacaaaaagccccaacgtttcttcaggcagaagtgcgcgatgcgagataaagtgagacactaacggcgaggctcgggcaatgtgatttgtgttttgccactggagcctagactttgtttcttttttcacttcaactttatttaatcgaatgatatctattggtactttgaggaagaagtagtagagaggggtttgatagtctaggattgcatgaaagagcaagggaggatcttgtggcaattcctatatactctaggtatcgctattttagaaagagggacagcacacgttcaatggtccctgaattatcttcctggacattataagcaagcaagatgcattagcctaggtttcctctaatattacatcgaaatcgttacaaattgcgctgttgaagtagcctgactgggtgtacactatagcctgttgagctttgaaagtaattccttgacaaatgatttactagttatccaaagggatgtcccattaacaatcccctatataaaagtgtacgattgtaccttatcaacattgagcaacagccagtatgaaccattaaccaataagagctgcatagttctccactctgcgaataggacggccgtctactccaatggatagcaaattccgattccgagatagccaggtactttgtagatcacacagataaggtgcggggaatacgtaggacgaaggactgccttgtgtctctctcccctctttcttatatatctcagttcaccctccgaaaccagccatattccatctcaaatcactcatcaatatgactcttaattgggagatccaagcccaaagaggcagagatatcttgaacaattctattccgaaacaatggcttctccccgtcgacaggctgccgccagcctcgcagaagagtgtgattgacttcccccgacaaagcgggttgttgaatgagcgcgagctcgttatcactgatatgtcggctacggcactggtgaccgaaatgggtaatggaacaatgagcgcggaagaggtggtgactgcgttcttgaagagggccgtgttgggccatcaactggtgagattgagattgggagatgtggactgtgtaattccaatgttgacatgcttgtcagctcaatttcgcaacagagttcatggcagacgaggcaatcgctcgcgccaaagagcatgatgagtactacagacgtacaggaaaactggtcgggcccctggtaagctcatatacatgttcaaatttatcacagcgagattttaatgaaacaaccacagcacggtataccaatcagcgtgaaagaacacatagcaatgaaaaaccgaacatgcaacacgggatacgtagcttggtgagtataaatccaccacgacagcccgcattgctgacaagcaaaacagggtcgataaagtcaccacggaagatgctcttctcctccaacttctatctaaagccggcgcgatttttcacgttcggactaacgagccccagtcattgatggtatgtccacaacttccacattagcggtgtatcccataaccaatgccatctagcatctatgctgcagcaacaatatcaccggcacgacattgaacccacttaatctcactctcagtccaggcgggtcctccggaggcgaaggtgcctcaatggccttccggtgcgcaccacttgggattggcactgatatcggcggatcaattcgctgccccgcagcgttttgcggtgcgtacggcttccgtccttcctcactgcggaaccctgtaacagggctcaaagtcgctgcttcgggccaggagacaatccgcggcgtggtgggtccactggctagttgttcaattgaggatctagagctattccagagagctgcattggagcaggagccttggaatattgagacatcgctgatgcctgtggcgtggaagacggttcttccgacacgggatatgactgtggctatcatgtgggatgatgggtatgtcgtgattcaaataaatgtctgctgtcagtatgttaatccatttcccagctgcgtccgcccccatccacctattactcgtgctctgagacacgccaaggagaagctggtagcggctggtgtgaatgtcgtagactgggaaccgtataagcaccagcatggctgggaagttattgtaagtgctgggtattctctgggcaagcacgttataacgctaacatagcccagcgcgctttatactaccccgaagctggcagcaagcaacgcgaagttctcgccgaatcaggtgagccggcacgcccactaactgattgggctctctcctatagccgaagcatgccactttcgcaccccgaagcatgggccctgcaagagcagcgtgatatctacagagatgaatatcatgctctcttcaatcgtcgcggtgttgactttattctgtccccgacatatcccgctgccgcggcagtgatgggcgagtcgcagtattggaattatactgcgatttggaacttagttgacctaccttccgtagtattcccatctggaatcttcgtggatcccaaggtagacatgttgacggagcaagacaaagagtacgttcacagggatgaggttgatgagagagagtggcgtaagtaccagggtccggaaagatatgagggcgcgtcggtgggactgcagctttctgggaagcggtttaaggacgaggagaccctagcggcggccaaggttattgaagggattgtgagagacaaggaatacttgaagacttgaagacttggggggcttgggaatggataaattgattcgatgaattttacttacaacacatttacacctcagctatgtctcttcgtagcaaataccatagcaagcggcgtagcagtcttcactttcttcccctcaaaggccctctccatctcatcccacagtggattaatgtccacctctgatacactcggtgtcgtccaggtagatgaataacctctaaaccagtcacagtcctgctcatccatccaatccacgtcattctcctcccaaacaatctcctctccatccctaacttgactctcaccaactcgatcattaatcctaaaagcctcaatactcccccgagcattaacatataatctcctcacgccctcccagtcgtccacagggaatcctagagcctcagtaccagaattcaaaattcttagtgcatgatcaagcatcggatcatgaacctcattcgcataaaacgaacaaacagccccccaggccctctgagccctctcatttccgacaatgcgcggataattataatgcgtaatgacaagcgtcccacccgggcgtaactcccgcgcaaattccgcaatcgcaatctccggccttgtccagtggatacactcacacgccatgatcaggtcgaccgagccagactccacagagctcctttcggcactttccttcaggaaccggaagctagattcaggaaggccggattcctcgactaggactctgcgagcgagcgcggtgtacccgtcgttcggatcagagacgatcactttgttgaagcgcggggcgagacttgatgagacgattccgcagccggcgccgacatcctgagcaagggaccaggtggaatggggtttttgagagtggtaggtaaagactttttcgaagaaagagggcgggtagactggacgaaaggtaaggtagtcggaccagtttacgccttgattggagttgaagccatattctatggtgggtgtggtttcggatgacattggtgatttagatatttgggaaacgattgaatgatgagaggtgacgatgatatattcaactaatgctctaggggtaatagggtgtatttatatgttgttttcttgttttctgcttttttttttgcgaacagatatcattttgttatttgtcattccctaaacagaggtatagcaatgagaaagtgtaaaggatcgggattaatgaaccagaccgtgtctattcgttgggattttgggaatttgaacaatcttccaatcaaagaggttcagacagagatcttcgatcagatctctagaatatctctagatctcggagaacatcggtcaggtcgatctcggatctcttctcacatctagatcacataattgtttggcatactccatatgacctttctccttggtatccatggtactatcccgtgctcgtatattgcgtatactgcagctatgcttgagtttttctccaaccccctcgagttctgcacggtggggctggtggagtcgcggtgatcttcaaatagcgcctcaacaagctcctatacaaaagaatgggctttttgtgaactaagcgtagtccgttttctttttctttttctatctataggtaggtggggttaactgcaacccaaatacggacatctcaacccgactcagctctcaaatcctgcagcgacctaatctggccaccatcttccccaaaattcccaacatccagccatttctccatggcagacttcagcgaagcatcccactcatccctcaaaatagaaaaccaagccgtatccctatttctccccttgacaatcatatgttgtcgaaagactccttcaaatgaaaaccccaagcgtgaagccgcacgccgcgaaggctcatttagcgaattacatttccactccaacctcctatacccaagatcatggaaagcatgctgagcgaggagatagatcgcctctgtcgcgccggttgtgcgctggagcgcagccgagtacattacattcccgatttcaatgcccaggtgatcaggagtcatgcgcatcagagagagatagccaatgggttttccgaaagtggggaaagaattgcgcctgtcgatgattgtgtagaagaatgggtctgtcgaagtggatttcgatgcgatgctggttttgaaagtttcaacatccgagtacggcccgtcgaacatgtagtcccataggtctgctctagatggttcaagtccaccgatgagggcaaagaggtcatctgcgtgctttggcgagagtttctcgaggagaattgctcggcctggaattgtttggctcgttggtagtagagctggagtgaaggggactattggacctttggggcgtagtactgccattttgaaattgatttgtttcagctattgatgtttgaaattgagagcgcggcgatattatatggatgctaccagctaatacctagcggagttggccgtgtatatactgtttattggactgatctatgtatgactcacgccagtgtgatttgttgtgaatgccgagagtccggacgtgataggttgattctccgaactggagcaaaagtacagattgactcaatagcgaggacaattttgcaggaatttcggaagattagcaactaattacttacattgatgtggactatagacagctgcttctccttacctttaaaataaaccagttttgcccctctttttgtacagcaaataccataaaaagatcagctggaatgcgccaaaacacatgactatcccactaaacaattgaatacccaagtagttcaaatccgcactaccatcggcgccaattgaagcgagcgcacctgctattggtggtcccacaagactcgcaaagctactcaagctttgcgccattccaagccaagttccaagactcttgggatcgggacagacgtgagtgaaaacgctcggcggcagaggaatcaaagccccggagataccacctgtgatttgggtcaaaatagagcaccgatgacttggagaatgaacttcacttaccatagaaggcagcaaaaagaacaaaccgggcaaggctgtctgcactgatccaacaaatacacagaacgcctgagagtataccgcaaatgatccaagcaatcatcgacccatagtaatgagcgaacaaagtcaagacaacacggccaataaccgaagaagcctgggaaatcatcaagatattagaggccattgagcgcgatgtacctagttttgtctccgcgtaagtcggaatgtaatagaaaggcgtgatataaccaaggtaaagaaaaaagttcccgatagcaaagctccaaaaaggcaaatccttcaatgcgcgcaaatcaatcaagctcctgcgctgggtatttttaaccttcactgcatgtctctccggccacaaaagcataatagcagccgcgatgaacagcgccagcatcaagaacgccacaaggcggacggtccaggcgaacccaacctttgatataagctggttgaacatcgttgtatagataatacccccgacaggcgcaccgctactcgaaatacctagcgcaacagcccttcttgttgtgaaagaacggctgaccaatgcaatagcagggacataaagcagtccgaatccgaggcccatgcagaccccctggcttaggaatatggcgtagtagtcatgtgcaagactgagcatcattatgccgactacacctagggtactgccgacgaaaatcatgctctggttgtagccaaggtcgaaaagtgggccggatagtagaccgccgacgattaggagccaggattgaatcgttccaatccaggcgatgtcagatgatgtcgatgatgggatataggtgagtgcatagtagctttggaatgtcccaaatgcgaggttgaggcccctggaaatcagttggttttgatattcaattggaagtcgaaagatgtttcacataccagacattgaagaatataaagaaagcaccgagaacttggagacagctatacactttactttttacagcaaaggtagagtgtattccagatgactcttcatcttccgtgatatgtgccagatctgtgacctcgggctgcgtcttgcctttttccgataacatgtttaacagcctcgaataagttcaattctaaatcaaaacggtagccaggattcgaaggaaataacaaaagctaagacccctcaaatgtattgaccagtcagtatattagccctgtaccgtatgcaacactgccgtgtttaccggtgatgcggggtgagtgtctttggggtaacaacctatcacgtatttcgaagcactgtttggagtcaatctcatgtcggatttgtaatttctacgctactaattagttagttaatatcgatacgaaaatatcacgcttaccaggattgagttgcgccattggggtgaaattgaccagcgaaaggtgtgatagtacctcggctaaaatcaaccaatgctttgtagtatgagcaatggacaagtcatacagtagattcgctagggttatatttgaggaagagcttgattggtgtagaccttgaatactacataatattcagtacagtataacatgcaatgaagataaataacctgctgggaagcatagtggacaacggaaccatttccgaagaatcagagctatcgataagtgatattgattttcacgttgagttatttttccttgaaaatatgatggggtatcaaatggagtcaagtaattttgatcatcatccaaagcattaattccaagctccaacagagagcataagtacatccatcaatacacatgtgcatgtatctgggaatagagagtaagcataaaaacatagaaacatgaaagcatgaaagcagaaaatagcactatcgtgacgatatttccatcattagaggagaaaaaagattgaacacctgatatcagaagcccaaatcagaagaactccacgagacccgggaaagccaagcccaagggcaatccagatagaaaagaaatcgcgaacaaaacaaaaggaacagcatgaagaaatgatcataatcatctacttccgccagaacatagcttttccaacggtcctgccagcagcccagcgagcttcggctagcttatccttgaaggacacaccgccgccgtagcgcacagggcgggaggaggccgctccagactcagaagtagcagtcgcactcgaaccgccgaaagaactaggagcgaagttcgtcatattacccgcatcgaacttcgtctttccttcaacgattttctgaacgacgttcaagatagcataagcagtagagccaacagcacgaatagccgcgaggacagcgacagaccacaagatgatagcgagatagatgtttgtgccgccggagtcaacaccgtagatttcggacacagccatggcgaggattacgtttgcgaccatccagatggagaccatgtaagtacggacagcacgatagtagtcctcctgcaactgggtatccgatggcgggggctcggggacctcgaggcgatcgcggaggttgcggagggccgcgtcgtagccggagtcaatatcgagttgttcggagggcatttcgatgacgacggttgagccgttgatggtctttgctgcaccgagatcggtgttgattacgttgtcacctttggttccccaagtgacgtcgtgggtgttgcagaaggcgtagacttggagaatgcagatgtagctgggcatgagcaaaaagtattggaccgaagaggtgaacatgtgccacgggtccaggtagaggaatgagctgtagaagtagagaccgacagttgacaacatggaaatcacaatgttcatcattaggctatcgccaacttctaggtcatcgtttccaaccccagcacgtgcgagtaactctttgaccaccaagtagagggcgcagaagaccgtgtagaacatgataatggcgtacacaatgataccagagagatagagattcttggcactgaaaagagaatgtcagtcaagttcgaatatatgacgaagcattttggactcacccttgcggtcgattacccagcgagataataaactgcaaacacataaccaggacacaggcatagcgcagaacaatgaagatatatttgcccatgttgtgaccaaatgggtcaagtttctcatcggttaaagagccagcaatgaaatagaaagcgaggtagaaattggcctgtgaaagtcagtggacgcccccaaagaaaacagagcgcaaaactcacaagaccaaagtaagtaaacagcaaattaaggaattgataaaagaactcgatgtgaagcaagaccttccgggtaaaagtatgatcggtcttccagatctgtttggcattgaaaatcgagtaaacagccgcgaagaacgcaccgttcagccatcttcgacgctgggagatgaactcaggaaccgagtccggcacatcggtttctccaacggcgttcttaacaaacttcaatacccatctctcttcccgtttggcgaccaactcccagcaaagaatacgatcttcggcgagatacatgttggcagtgaaaacgtctgcatcttgaccgtggagtgtttcacccttgaaatattggttcagggggccatgtccgtctgcgtcgttttgcagcgcaaagaatcgatatgcgctgagcgcaccgggcaacacagtgatgtaaccgaagactgattccagcggcttgtcgagaatattggacattttgtattcgaagttctgacttgccaccagagggttgagcagaccgagcatgttcttacctttagcagccttgatctctccagcagcgccggcaacattggagtcctgatcaaacgccttccacaagtggtagagcgccattggctctggtcgagttccaacatcgagcaaaatacaaatgttaggctgaagggcacgaccaaaggcattgaaaaaccatctgtgggagttcagcttcttcttgttgtgttccttcaaacagaagataacctgacacggaacaattcccttctccgcacccttaaacttgagatcatcatcaagcgagacctgcgtggtgtactcgtacacgtgtgcctgaacttccttttggttgacaatattcttcgcaataccctcctggtaaacacccagggcggccaatgcattgagtgtgcgcgggtggaccttcttacgtccatcagccacaatgcaaacaacgattttcttccatccatcgcggccccaagtacgcgacttggtgcgcgagcagaagtggctgatattctgcataacgccatgcatagtacgggtgaaaccaatctcgtcttcgttgtacatggtaatacaaataaacagctctgtctcgcgagtcgtggtaccaatctgctgccgaagcttatatccacgttcgccatagtcgtccggatcggttgtaacagcggtatatcgcatgtgcgtgaactcacgctcatcgcggcgagggaggaagctgtgaagaatggtgggaattttgcactccaaaataagctctccattgaccaactgaacttcttttttggcgacctgcttggatcggacaccacgacggccctgcttgtcgggtgctgggccatagtggaggttgggatccaaaacgtgcgattcgtcgtcataatcatcatcgagatcgactttggacatgccatctttctcgtctcccaacattgtcgattcgctcatgaatgatcggacactggcgcgtgaggtgtggttaattgtgcggccatcaccaccgaatggatcttcgccatgggcatcaccaatatcgatgctcgtatccattgttgattttggtccagtgaacaacggcgcaggaggcaatggtcgacggggactacccccatatcttgagctgggtgtaccgggccttggactaccgtttaaatcggcgcgctcatatccaacacttgacacggagggtggtcggatgtgggatgggctccatgggcgaattggcgatcctgtgcgtgggggaatagatgggtagacagaagtgtctgcgaggtttgctgtgggaggcgggatactgggtacactggacaagctggatggtggacgcgaaggtgaagcgacgctaggcacctggtaataactatcatagcttcgatcatgtccggtcctataattgtgcgccctggtgttagaccttggtcttggaagacgttccattttgccgcgaagctggcactaagaggcccaatgtggaggtggaggggggatgggacagtaaacaatgcactagtatcaagtgtacaatgtttacaatgtttacagggtgggtgattgacaaacagcaaggaaggaaggagttggctcggtccttgtagcaatgcccattgacgggcaattgctcgaggctcccagcctctccgtcccgtcaatgaaggagtcggatttggcagtgcacgtggctccatcgcgagggaaaccactggaatgtgaagacggacagggttgcatcagagacaattgggaagtatagggaagtacatacggagtgtgatcataatctgggtcataatgggagggcatatgactgatacctgaatcatcgacaccgtcgccgcttggcaacaagcgcatcgttcctccattcagacgtgaggcattggtcggagagtcaggatcggacagataggaacttgcgtcatggttgaggtatgcgggcggcgcgtcgccgtattcggatggcggatggcggttcatgatagaacgtggaatgtgatgtttttttgtttcaactcactgcctcatagtattccacctgaggtgggtatcgatgagacaacgatgagaattaatccccgtctctcgaagatacgacagagtgggggtagatctgtttggttcgacagatgaggctcgaggaatggaggaatgtgagtataatatcaatattaaagctccacacacaagcaagatgaagaggatcaaagaggatcaaaggggataaaagagtaaaatggatcgactggggaaacaagtccagcccgttcatatccgtcgctctgcatcaacaaggtggaggtctaggtggttgtcagggcaacgctgaatttggcgaccgaatcagcacgggaaacacttggaaaacaatactccaattagtattgaaatgaaatatcacaggagattcttcgttattccattttattccttcccaatgcaatatcaaattgtcaatatcaagtcgccaaagtattcatcgcatcttcaatatccccagtcccaagtgggtcgatgcattctgacatgaatacgccacttgaacaaaactacattattccaggtggtatcacaaaagaatgcataattctgccaaaacaagactggccttgcagatctccccaaatcccatactttcattctttggttctcgttctgggccttcagtcccaacgaacaactggttaggttaggttaatcatggcagtaggtcctttgttgatgccatgatgacaccgctcacaccccctcgttgagcagtggctctctctcccggtccactgaatcggggtgggcaacacgacggaagaggctgtcgcggccggtgtacttagtcgtggagaggtacagagagacagacaagaacacggcaaatacggtaaaggcaaagatccactgcagggcaatgatctttatagcgacttgtctgacggcgagtgctagggttatgtatatcagcaaggcacttaagcaaatgatagtaaaagaaagaacttacacagagtcaaccaacttaaacaatacccaaggatataatcctcgcgagggacgatactgaacagtccgattgcgagaataacccagataaagatgttagcaacaatacggccaggcaggttatggctgtgaacagcgactgcgccgttccagaacaacgccatcaatgtccaggcatagggaccggcaacagcgggtaggtggacgaacaccggcaggccactgtggcgccagtaggtgactgtctggttgatgaagtgggcgatgaggatgatctctgcgccccaaaattggttgcgggtccagagcagaatccaagcggcgaggaagacgttgtttaggatgaaatgggtggcgacattggcagctgccacgacgaggacattgttcttggaaaagaggtgccagacgtagctgagctgagagaggaggaggaatatcctagatgggggattaatttgtggacatcccaaagctatagacattggctaaactaaccagaaaaccccagtcaaagtagtgttctcgctgaatggagtattatgcttattggcctgcttccagagcttcttgcccttcttggtatcgtcgggcgagtgaacggaatgatagatgccgatcactacgaccaaagcccaggtgagaggtacaaagactcggtatgtattcagcgaactggcgctgtgagtttcgcgtctagcgaacgggttgaatgatgccatgatagagttattacccaagctgaggaagctgaggaagccgatgataatttttaataaaaggaaccgagagtctagaagatgggggtcttataatcaaggattaaaaggggattccccgcatatggtcatcagaccatactattccaggacttgcagatgaggtcaattccatggtgatgacatcaacgcttccatccattgagggtcacttagggttacttccaactacatagcatagttatgtactccatctcgcgaaagctgaagagaccatgatttattctatcaatcataaccacatctttcggttttactagaaatagaaatacttgtgtttctgtgaaacatggactgagcgtcatcccagtctaactacagtgagaaaataacctgacgtaaccttgatcaagcgtagatcatcgcgcacagtccttttcaatacagatttcaacctcaaatacagtgagcaagctaaaaatccaaaagtactcgagttattatgctgagcgtaggaccttgggagacagaaatcaaggaaaatgagacccgcaactgagctgagcctaccttggcgccggaagacaatatttgaacttaaaaataaacttgaatggcatgttgaaacacgcgaggcaccgagtttgattctactcagcgttttacatactagtagtatgtactccgtatgttgtagggaataagtattactgtccgaatttggtaacgcggggaaatggccagtgctctcacctcatgccggtagaaataacagtctactttgcacacatgatgtgcaaaagtactagtatcaatagtaaccatgccaatgatatggttatctagggtatcaaaaccaacgtgcaaaaatataggagggaaaagaaatcacaatccccgcgcctccctcacagcctccaaaatcctcccatgaaccgaagccggcccaacaaccataccatgacacccagccagggtacgacccagcgaacaatcaactggtttcccctcaagatctgtaacaagacagcccaattcctgcacaataagcatgccacccgcatgatcccagatcttcgagcgataatccgcactcaacggcaccttaacgaaagcattacaccctccctgcacggcaatggcaatgtaacgcatctgcgctgaccataaatccaccggattcggccacggacagccaagatgcgccgccacacgagcatgagcctcgagatcctgcgtctttgccgcacgcgtatcaatgaaccgcacaccggaagctccaacctgcgggacatgttcaagcgggcgtgccggcagcaaggctcccggacccataggtctgatggtagctccctgcccgacaacggccgagatcatctggccaagaccgtcacggtcgacgcggtcttcagcgacgagtcctgactctaggagattcgggcagccgaggacgccgattctttggatcccgttttcgactaatgagaggcagactgcgtactgctcgccgcggatgaaggttgctgttccatctacgggatctagagtccaggtcctgctagtgggggtgcaggcgccttttgcgccgaggtcaattaggtcgaggagttcggaggtggtacgtggagtgtggagaagggcttcgctttctgggtcattgaggtggatgctggttgctaggtcccaggttcttgcgagaagatctgggtttgagcggagggctgtggcatcttcttcgccgacgatatcgtcgtctgggaagacgttgtggatggctgcaattattgaggcttgggcggcaaagtcggcgattgttacgggtgaggagtcgctcttgtcaagggcgcctttgtcgacagcagagaggagctcttttgtcaggatggctgctcgttgtacagctaggctggcgagctggagctctttggcgtagggcattgaggtcattgtaggcggctttaggggttgtgtgtgtggagggtttcgatattcatccagggtagatttggttgaccggatgtagaaatgacagttctgagcgacaagtatgaaaacggtagtttattttttgggacacagaggggcatcacgtgcagcgaaacaccggtgagtacatgtatgtatccctacgtcatatctcaatctatactgatccactacaatatcaatagtatcatgagcatatctggtcgaaagatcttatttggcacaggctataatataagtaaaggcgtcagaaaaccttggacataaaattgcgtagagattcgtcagaccatactcaatatatataacaagaaatatgatcaaacgttgtatcacaagtatcaccatctatacaccgaattcaacaaatccttaagagcttttatccagaccaactcattacaacctagccttgtcttcttcacgaccctgaaggttagggtgaggggttcgaatgggtcgagtaaccgcgtagaaggcaagcccttgagacttagtcgagaactagaccgagaaattagaatacttcaactaatatctcgcgtacgagggtcatgacaaaccttgaccttagatccaacatagaaaaaagcaaagtctcccgggactaggtgatgggtgacacctgtcgcctcgtcctatttgtaaccgaaatgatcaataaccaaaagatttaagaagcagatgtcaaggtataatgggggagataccaaaatatcgatctgaccattgaggatatactttgtctcctcaaaattgtagtttgcgggtctttcgggtccagcctcgatcttatagaatcccgaggtgaagtatgcaggggattcagtattggtgcggatagagtggaagtcggcagtggtcgcgttctcgccctgaggaagggggatgaactcgtggccagcgcctttaatgacggtaataggaacgatattgctagacactttccataggtgaacgtattagagactgtatgatttgttctggaggtcgtgaggaaaaactcactgttgctatacttgatagatatggtcagaattgggacatatttaggaacaagatgtccatcaactaatatacacactcattgtactacagacggtattactcggtggcattcccgggatacagcgaagatcctgcgtgctttatcctgatgaggggaaaagtccccgtgccctcatgaggggaacactcgggtgcatcgcccggaggtggagaaatgtcgggcggagagccgtgggagccgtgatcaagtaaggtgttcttataattctcagggattgcgtgctctttgccacttcacgaagaggataaggctaaggatagaagaaagtgaggaaaaaggaagagagcggctgtacaaattctggtaccctgtactttgactacaatccacatgtcccctgatcggagagtctactatgatatgctttgaccatatggtgctcttgagttatcgaggttaaaaaatgatcattaccaggatagaaaggtcaacaagtcataatcattcaattgaggatatgtaggggaaaagccccaagaaaaaataaaaacagcatcggattaaacctcaatgtactcttgacgagggaacccagcgcggaggtatatcacataaaacgccgaaccatcatatccatgtaaaccagcaagacaagatcagaaggaagcaaatgccagctcgtaagcaaaagccaagctcatctttgcatgctgcagcatatgatcgaagctcaaatactcgatcttgtcctcggtagtgtggatcctcttatcggagttctcgaactgagactcgatcacaaatgccgaggggtatccgtaccgactagcagaagcatgatcagagcatgcatagccacactttgtctcgacatagggcacatcgcagtacgtggtgataacctccttaatgaacgcagtaaggccctggtcgacgtagtcgataataacacccacagactccttctcgccagcatcaagagtaccctgaacatacccagtcatgtcttgctggagcatggccttgacgttccgctggttcttcttgtaattagcatatacagcctgtgatccgagtaaaccaccttcctcggcagagtaccagtggaactcgatagtgttacgggcttttccgtgggttatagtctccgaccgcagcagggcgcgaagagcttcgaggatagtaactgttccacttccgtcatcatccgcgcccggggcagccaggatcgaaggcaggaacaagttgatgctatcctggtgggaaccgaggacgacggtgttatccgtctgaccgggaatgcgcgcaataatgctgaactgaccccagggatgagcgaagcgctcgacggttgcaccgtggtcactggcgccagactcgtgcactgcggcagtcacttggtcaaatagccaggttgctgactcgattcccgtttgcgacttgtagtagcgcgtgtggaaggatgtgaagtgttccaggttgcttctcatgttactcttgtcgagagtttcggtcaaaggcagaatctcgtgtgagtgctccatagcccctggatagtggacgacccgcgtggtgtggagggttccgtaggagcctgattggtattcatcggtgacatcgatgaagttcactccgtcctagtcgggggttagtactatgtcattgagtttcgaatcaaaaaaaaaaaaaatggcttaccagcttgagcgaccatttttcttcttcagttacccatcgggttcggtatggggccagttcaatcagagacttcgactgagggttttgaacaattgaaggtgctagaggttgttgctccgggttgactatgaccatggcagatgccgttgcgctgagcgcaagagtgaggaacttcatgataataaggataagcagaataagcagaataagcagggtaagggtcgagagggtttaaggattcttttaaaaggctagaagtgcaggtgttgggcacgcgccctgcgccaagccatttttggaccccgcgcgctaaaacactaaggctctgtatcatattattcttagaccggactgccggtgcatccggttgatcctttaacaatgaaatctctaacacgtacggatcatatcggctcgcaggatcttgttcgagactatcaaacccggggaacaggcacctaaagcacgaaaagcaccaaaagcctagacatgactcggcgagtctggggattgaaggtggagaatgggagaagaaactccactatgacagcgctatgactcacagccatgcggagataaggctcatatgtacacatcatggtgaagactaatataaggatacagagttattgtctacagccttgagctagtgtctactccgtacagcttcgatatttgctccactgtcaggccaactcatattcccaaatagggaactagggctagggctatcaggtgaccaatcaccaccaatcagcgtctggcgagttgtcccgtgcagacaaccttgcgtatcatctgtcccaggtccttatcttgcccattcctatcctatccttatccctctttctcctagacttgttgccttgattagatcatatcgcatacattatggctatccatccacgcctgcgaccagagggttcccagggccacctgtcgccgcaacaagccatagccatctccgcatggacagagcaacatgcagcagcgtccctgcgggatatgaccctatcggactcagcccctgcagcgacaacgccgtctacaccgactccgacgcgttcgggtccgcgcggagtcaccgtctcgctgtcgatccctctcgacgacgacgaagcgatcccgtcccaacgagtcaaggccgagtcccgccctccgacagtcagcttccgacgtcgggagcctctgcgccgggatggcctcaagacccgagaggctctactcaagggtaaagatggcagccgtcggagacagcgctgggagaacggtacgttgtatatgcactagataggtcgcggcgaatgccgacttgtacctttttgcctttggtgcaggtttggcaggcaaatgctgactaggcactaagatcgtctcttgcacaacccctgggcgcaaccgccctcttcaaaggactgggatgtccagcctacctatcctcggcatgacccgatgccttattatcttgcgcccctgtgggacgttcactattcccatgtggtggatcaccagtcggccgcgagggctgctgagagggccaatgagaagcatcaaattccgaaggtactgaggttaaagctgaagcatgcgcgtgccgcgcatggcatgctccgagatctggaagaggaggtccgtacgtttattcaaaagtggaatgaaagggagcttctacttgagaaagagggcttgcgggatgctcctgagtactcgaccagtgatgattcggaagatgagatcgtctttgtcggtcggaatgggcagatgcacgactcgcccgagcgaaaggagagactccgcttgctccgagaggagatcagctctcacagcgagcgagacggtgagaagatggtgctcgagactctggctgatgatcgtgctgctggattcgggtatgttttaagccttccctccaccttattccagtccgctgactcttctcagtcgctggttagtccactccatcgcatcctactatggattgcacacttggtccatcacagtagaagaccgacgagaagcctatgtgggcttccgatccccggttccgggaagccgcgccgggctcgtttcccacccagcttgccattcagaggccctgatcaagcccggcgaggagctccctcggcctctctatgctcaagtgtaaacttccgccttcttgccctttctcttctgtcttccagattggacatatttattggggagtaacgttcgcggatttgtaattcatgttgtctctcggctacaggtggtcatatgtagatctcattggacgtattttctcggtcgcaattcaggtcaagggatatatttcctcgtagcattgatgcaatgttgatcaattgttggtgagtggggactatgggttcatggtgtgttcagttgaatcacagtgaagaatgcgagtgggatctagaaacccccttcgttttcgtgatgcagctgtaagtctgtgcaccgaaactagctgatcatatgtcgtcatgctaaggcccaagacatggctgtgaggagcattagattgatcgcgatcgtacgatgggaagaatgttgaccgtgcagggcgaaccgcgcaggatcggatacctcttcgatatgacatgatattctgaccaagccaaagtatatgtgatcttacgtacaacaggtccctgtgcactcctataccgtcggctatcaccgtctccaccacacaatggatcggaacggaccgtggggcccacggtttccaaggttcccataacgtccagggtattgtatatgtataaagggatgtctctgacaagctggacgttgtgtcctccttgcgtataacgtctcaagaattcccaagtgcttggacgctacagggcccgagccctaacgtaacaaagcagaagtctaatctcttatggagtacaggaatctcgtgtctagactagttcaatgcaggcccccgcaatctcactggctttcggagactaaaaagcaaaaagaagtgcaaagccacgaatgaagacgagagacagggaccaccatacagcacatcgtacgctagagaggagttctcccaccccttataggtagattcgcccatagcccaggatctgtggctgattttcgctttcttttcttttttctttgctttcgatttgtgccacggcctgcgatagtcgggtgcaacggtgtggctctggataaatcgctcgatcgtgtagaacaaagagtcgggtacccaaaaatgacgagttgaacattctccatttccccaatgttctaaatacttcgcacattgtgacagtccagagttctacattctctctgacctagtgttggccggctccaactcctttttctgctttgctcgttcccctcgctggcacattctccccccgattccactatatattttggcttctcaacaaggtagcccccacccctgtcctattccctcaatcatatgattttctttctcgtttcacttgtaccatcctggatgataaccttggagatatcactctaatgtcccttgtcgctgttattctacctcggtgtcccatgagaatctgacccctctttgacttgcggaatcaaccggactatctatccacaggtccaaacgcctggtgtgatcgcttttgctctgatataccctattgggccaaccacaccacctgcggcttacttacggctgatatttgatattactcctggcttcgatccacttgttccacctttttttcgcttatttcactgtaaaccagtggaacacatacatatacatacacaccccacaacccaaatcaacattgcaagcaccatgggctcctataaatcctcccaacctggcagctacagctcgacagacagcacatcttcaaaaagtacgacagcaacgatccacagcgaccgactaacccccaagccacacaaaaccgacgaggccaccaacccagcccccccaaaacacacctacaaatacgaaaccaaaggcgaagtcgtatatgagtgtcgtgagccgcatccccgcgcctcaacctcaacctacgcctccacaacatactccacagccgaacttgacctggagccccaaccagccgagtctgcaagtccccatgaaggtcgctactgcgtaaatgagcggctagaattctatccactggaggccatcccctcaacgccttcatcctttgcgccgctcttcccttcctcgcggcggctgctcatccgccacgacgatgcaaccgtcgacggcaacatgaacttgcgcgtcggcacgcccgtccacctacgcgacggctcccagcgcgacgtcatcctcttccatttgcgcatgtacgacctcctcgcgcggaagttctcgttccggcggtactgccgggactcgggccgcgaggtgtgcaattccgcaaggcgggaggttgtgcctgctcatgggcgaaggcctgcgctgcgcacctcgtggagtagcgttttcgctgggcttaggcctggttcggccggtggtcattgtccgactgatgagctcaagaggcagcattcaaggcttgggggtggttatggacatggacatcctgcgggggacgaggtagataagggaatgacagaagagaatgagtgggagaaggaaggaaagagcgctttgccgatactcggtgagacgattttgatcgaattctcgaattatgcgcatgtcgagctgcgccgcaaagggcccggctcgaccaagaaatacgagtttgagtattggtccacgaagtaccagtggcggagggaggtccgcaaagagggtgatctgcatgaagtgtcttatttcttggttgacacgcgcaattctaagactattgctcatttggtaccggatacgctggctccgctggaggttgttgaggaggagagcaagggggggtgggtgccaccttcttcattgtggatcagtgatcctgaagtttacaagacgatgcctgatgttgccgagtaagttattctgaacccctgttcgacccctcaaccacttggctagtttctctggttctatccttagctctggatctgtatctttcccctcttttgtctctcttttttttttctttttctgtgatttctacagggggtctgtgtttcgtgtacaatgcaccaacgcatgcaccatgcacaatgtaccatggaacccctgcacaaattgacgagacatgaggctgatgaattggctcgctcttttacagtgtgattgttgcaacagggatagttgcgctagttgacgactgcattcgtcgtcgctggcatcacgagcggcgtccgtcttggatcctgcccgctcagcactcgctggtcaaaagtctggaacgcatgggccctcggcgcctgatcggccaggtactccagcgcagaggatccgcctaagcgatacaggggtcctcggctccacgaccagacaagaatggtgtattatgagatggaccggattgatgagttggtcctgcactagccagggcttggtgctgcctctaatgacttaatgatatgaatgacgcgggatatgaatgttttgttcttgttctagtttagcttcttgtgactgattcctgtcatgcattctattgtctttttttggtattattttattttttttcgctcctcctttttgcctcatcttatttgtttattgacacgggtcatctcggtttcacggcatacggattcgagcagcctgattccgggcgatcctctaatacgggtctgacagggaccaagcaggcttgcagatttgtgcatttttcattgcatggcttggacatagcttacagtttcatctcacatctttcccaatggtctattcctatgctggcgttgcatacatatgtattacgtagagtctgaccgctccaagttgaaccatggttctattttgagctagagctggtctagcttctacgaaccatggttcgagtcacgagctagatgctgtctcgtgcttcattgacctatggatctttggccatatgcatgcacaccctacaccctcattccggactttcctcataatgcaagccataggaaggaatgccagtcttgtttagggcttacgatcgattggccctgaatgaatcttttgtttttagcgcgactaagagcccaaagagcatacccctggccttgctgccttatggaaattcaagaaatagccaatatcaggcccagcatgtatttttagtacgcccgtatactgatttaggacagctactactgtaggtaccaattttgtacgtggtacttatgtagtctactgcgcagcatacatgtatggatgtacctcaaccgatcaagatgtgcggggcaagccccctcgaatccgtaatattttagccgccctataataatgtgctggcctagtgccctaccccatcggctgtttctctacgtgtttcgtgcatactcgatgttagccgcattactgagaaccatggttgaggatattgtcgactctgcatgaatgcccaacacttctccaaagcaaacaccccgtcgctccgactggaacactcggattctctctggacaatcacaaatgaactaacaaatgaacggtcgatgaattcccttcgatggggtctctgcaggcggttaaccggacgggactagccgacaacgtgaaaatgaaccaggggttcttggccgtatctttgttcgagatctctgcaacacacgaactcttgccgcctttctgacgtttctccggaaatgccacccatcccgcctcattccctcgcatcgtcctttttttctcttcatgttgatcctaggcccgacagcaactgttcatgcagggcggcccggtctgtggctttcgaggtgcccagcaactccttccgagtcaacaatgtgcgaaatgcgacttctcacaatcatgatctcatccatcatgatgagctggcaacgctttccagtgcggcccaacttggggggttgaatctacatttcgggcatcctccacatcctcccagacccgaaaaacaattaaacaataaaagctatgacactgacgctgtggccatgggctccgctttttgggcagagaccacccacagctcttttcccccctcatgcagtccctcatggttgttccagaagcccgccgttccgccgatatggttcaagtccatgcgcaaactaatctcgggagattataatgtttccgtcttgccctaaagtacttctgctcaagtgaggcaagcaagaatgagaaaaaagaaaaaaaaaaaaggaaaatccaggaaaatcgcacgcaaatccccccccaaaaatttaacccaacgtggggttctctgagttgttcactttttccatccaatccgggtccaactttcttccgaaaaagggtgttatttattctggatcctagaagaattcgccaatatctccctgtctgtcatagagcgggaactaacttgggaacatccggcgtgcccctcttccttctatagcccttacgtgctgtctagcgtttcttcaagggctgttttttgcttagtcggcgtgcgccgggccgatccaggttgcagcctcaaaatgatccgcatactcttcgccgttccttgactggtggataaggaggggggggatttggctgacgctgtgccatgtccacatcgacatgcataaaccccctcctccgttagtttgacggttaggctcctgtttgttcgaaaataaaatattttaaaaaaaagatgccaaaaaaaagaaatacagaaataaatttcaaaaatacagagagaaaaaaaacccacggggttttctttcctggccttgaagatatggcccactgtttatataactccccgcttcccattgtcgtcctcgtgggaaggttattgaaaatcacatttaagaagacctctagagattccaaacgggtccaattaagatcctgttcgttctatatcttcttgtggttttcccttgaagttcacctcttgtttctccttcgatcttcatcttcaattgggttattcacagacacccatatcctccccactcttcaatcccacttcatatcaccccaactgcaaagcccaacggctctcctgctatcctatctttctaccaagcaacaatgtcctataccaccagtccccaggggaatagtgctggcagccgccccagctggcaggaccagctccagggtaagccattggaatgcgtggtcaagcctcagcagtcccaagtttcacctcaaatgacaggacggcccgactaaaccatcaccagatcattgcacacgcaccaagctatctcctcctgtcttcaacattgtctccgatcggcgaggtacttatccgatttccaatcctcctcctccccctcagtcttcatccaccgtcttcccatgctgcagaccctgattattttatttcccttcttacgcttcgtctcaacacacacgcacatagcgtgcctctatccctgctatgtgtctcgtgtgtgggcattgcaggagggagtggagtcttgcagaaaaagacagagaaaaatgcccccccccttcacttgtacaccgacttttagtttccaagcctttggcagcagaaggctaattacttttatctcggaattgcaggaggtcgtactgcttggtccagtaccgtcaccgttcagggccagaatatcgccgctcgttactggtatgacggtcagtttatcaataatgccaaagaggacgccgccgaggttgccctcaagaccctgaaccagcagcccagagctgctaccgtctaccagggtcagctgttcccgcaggcaacgtcgtccggctatggtcgcggaactggcgggttctgaccgtgtgttctttagctcaaatatttcctactcgtcttgggcggcattctcttcccttcttgtgtttttatcaaattcttttggttcttgattctgacgttgatactgaaccttgttgctcttaatctctgggtgtgtgggtgcttgttctggtttgttttccacctgtgaagggccctcggggatccacaagtcctatccgacacacaaacccatacatttgttgtcgcgttgctctcttacttgcatttctgactgcaggaaaaacccacatcccttcaccgcactcctctcctcccacctctttctcgtgtcgataccgttctcttcccgagcctcgttgatgcatgagcatgcactgtccctcgtcgacctctacctcttcccggtttctgcaggccctgcccacaatggctcactacaatgcagagtccatgtcatgagctctggtgagaggatcaccggcatcagaaagatggacaaataataaaagaggaaaatgcactatgcaccatccctgccccggatggccacttccagatgcaagtcactaccttgtttcgggattgtgaaacctcagcatcagttgtgacacaccacacccgagattccgacggctcaggtacatgatacggtgtctggatgccattaggcctcgtgtgatgcatcgcgaatcggactctcctttggctcttttcagcgcccctccccccacatacgtgtcttttgggggtgcacacacgtattcatttcaagaaacatccacttacgtttttctgcggccaattattgtttctgtctctcccgatttgggttaatacaggtcgcctctcgcactttattcgttccgcttttgttgcgccgtctgccttgagacaagatcggaattgggctagatgcttattaccatttgatgagaggcgagaggcgagagacgagggtcccatgcattgtgccaagtgactgctgtttgtcccttcgaagacatatgacttgtcatgctcgagcgggttcgacgtcatacccgggataatttacaatcgttactcccaactgcgcggttcgaatggcaatcacctgttgcatttgcaatagatgacaccccctgctgcttcgtttctccctggagctatggacgaatgtgtgtttgtctgtgccacggtggatgtgaagcgactcgcctaatcccaagcgcgttgcgacatggcaaatatggtggtggaagctacttggaaaaaggtcacaaggaggagttataggattatcatgggacaaaaattttcattttccgggcatctactttgtctagaatttggggtttcattttgatttgatttacgttctgcctgattattcgatgcgttttgccttgtttttttgtttttctttcctggttcagatcgggtgtctgcgactcacagagggagtttctttggtatctgttgtctcttgttaggctgcgttgggttttggacgttcggacacggaactggaccggggttatctattatattgggactgtaatggtcggggtttgatttgtatcagattgttctcttttgtctcttattatactacagaatatctatcgacagcactttacgggtgaattcttcttcttctcttttactaatgataggtacactgctggagccattgccggctggaacagactcgcccctttctagaaaagggtgctgtacatgcttaccctcgtttgaggtactattgatcaccgcgggttcttgccgcattggcctcccgtccgagcttacacatccgcgggtagcacagcgttggccatgtgtctagccaaacattaatttccgatgcatagcggccgagttgggcagcattccaaatggccgacgctgttcttggataaaatgaattaaataagttgtattaaaagctgatattaatattaatcgcttggcgacgcggagcatctagatatatttctacagtacgttgtagactcgacgttagatgttggtcagttactttggactgaaccatggaacgtcgaactctaataactatcaactctaattgtctattttgaccaactcattgcaggcctcgaatgaactcgaggtgaaagaagagaatctcagtatggattttcttaataattagggctagcgctatgctcggtatgttgcatatcgccacatagaatgcacattgtacaaaccctctgaagagtgatcgccaagactcctgcttgatctagtcgtgacaaaggtcgatctgccatatttgtactcagccttcctcgggcggtggctatgtcgatcaaattatacgggacagcaagtacatatacaatgatttatttcaccgtcgtagtcaatccaacctatctcaaaccaagaagcactttctaaaatacttgagaaatccaaaccatcacactgctatctgtcccattccaagcagataccttccacccaaataccaccatgtgtttcggctcatcgcgaagagagccgcatgactcaccgcccccggggcggcgcatacaccacagccctgacgcctacagccagtccgcatacaccaaggactacaagagaaacaagcgtcgtgcaggtcagaatgctggtgctgctggaggtggggatggtgtaagtggagatggtggcggcgggtgcggctagatctagagggttgggatgggcgtgggatatctttattgatttaatagctgcgattaatattgactacattacttttagggttgatgggatctggaatatgatttgaatttgaaaatctaggcaacgggacattaaactcagccgacatgtacaaatcttgcactttactcagtactccgtaatcgagaattcatacctaatttgtcattaaaagttatctatctattttatgactcagatacgtgcagtccaccttagctcgtgagctgagtcctatcgacagccaccacaacgctccagccttacacatttaatacgcgaaactctttccatctcttgccccgtgtccacggcggttgcgccagccgtagtagagcctcaatagaatgcagccagatgttacaaagagaagcaatgctgcatttgtccaatggccggtcggatacccgatctttgcttcgtcgcttttgtagatccaaacgccgacgatttggcctggtgcaccaaatgacacgttcagtgcgattgcgagtcctgcgccggccgttgagtttatattggaggatagccagcctagcagaggtgggatgcaggcgaaggcaccgctggctgcgactatgaggcatccgtatcggctctagtgtttgagttagtttatgacgctcattggcttgacgtgcccttgggatgattgggtgacttactagatatgcgctagcagggagaactgcggagacaaggaatcccattgccccgatgaaagagaatatggctgaatggagaccccggctgtaaatgaatatcaggtaagtcctaagtcccttagtatgtctcgatatagaagacgatttacctgttgaagtagtccgcagaccaagccacggttatagtcacgacataggctaccgcgtatggaggcactgtcatcagctgagcacggagatgagagtatcctagtccagcagtgatggcaggcgtgaaaagagaaagactcgagaatggcgttgagatgccgaagtacaccttttatctaattagtcctccagattggcaggggaaaaggtatagagaacataccgcataatgagcgtacaatctccaatccgtcagcgtagccttagcatcctcccaagacatagcatgggcagaacccttagatccttccaaaatcaacctctgcgcagcaagctccttctcttcagcagtgagccaattagcagtctctgggtaatccggcaacacaaaccagaccacaacagcagatgcgcatgatggagcgccctcaataataaacagccatctccaagcagaaaggccatgagcgccattcatatggcccacaccaaatgcaatagccccaccgaatgctccagctagtgttgccgaggcgagaatcaaggctacgcgtatggatcgctcggagttgcggtaccagaatgtaaggtagtatacgaagccggggaagaggccagcttccattacgccgaggagaaatcggagtcctgttacttgggaataggtgtggacgccaccaaggcctattgttgttgcaccccaggagaacatgaggaaggcgatccagcgctggtgtttgttaatggaattgtaataatggataatgtgtttgggttagacgtacacttggacggagcttcttcagaaagtaatttgatggtacttcaaacagtgcatatgcaatcaggaataccatgagtgcaattcttttgtagtcagcgctttggattctcttggtcaatcaatgtttgcgactcacgtgtactgatacgaagtcatattagtttccgagagaagatcattgtgagtgtccgaattcaagattttggcattgcctagatatattagctccaagtctatccgatatttgggaccggaggcataccaacgttagagcgatcaagataacaaagcaagtagattgcagcgcacaagggaacgatgcgtagatcttgtttccagaccaaggccttctcgcgtgcattgagggcatcgtcgacaatttccgtgctggcaagctgcactactgtcagtcttctcaagctcgtataccataacactagtaggttattataataatgggagaagggagaaagatacttctgaagcttgttcaacatctggcatgtatttttcggttgccatttttccaggacttagccacaatcacacagaaaagtcgaagtttcaggaacaaagaaatcagaaaagaccgcagtcctttttttcgccttcttttttccccatgtgatttagcttccccgggcttttgtcccccgggttgttccccgcactagggctactcgcagttcctccgatgcctcaccggtatttcggtattggggtattgggaaatccgatttcgggactagatctagtgttcgaagcgttggtttcttagtctaaaatgatgcttcgtagatattatttaggtgacatttgattggcgtctcttgtttcccctagatccccacatcgaaatctcagggaccgtctaggaccgattccaaaatgaggcaatacaagaagcattgataactaactagcgacaagtaagagttatcattggttttcttagtattgaatagtcttgtaaataatttgtatgttagttaggaaaatacattatctgtgaatcatattgctccgacaaaactaaggtaaaatatctcccacgatagatcagcgcattgaagaacttctcatacaaataagttgaaatacttgcatagagcgcgtgttgtataaaatcaaaagagcctcgggatgcaaacaagacaaacatcttatcagataaaagtgttcccgatcgcatcgcaaacactcaaatcacccctccccatgctatgccgccgtttgctatccaagcgcctcgctaaaacatcagattcagctctatctatatccgtcgcaactatgtcgactaccaccgctccctcccacaaatcgatgccctccgcgttaacgtttgatcgtcacgccaaatgctcggtacgtccttgtgataaacatttacaacctagctactgtaacatatatctaatgcatattatggtgcaaatagacaactaaggcccgtgcgagtacccttcaccttcctcacggctcagtgcctctgccgatcttcatgcccgtcgcgacacaagcatctcttaagggcctaacatatgatcagctgcgagagaccgggtgcatgctctgcttgaataatacataccacttaggtctgaagcctggtcaggcggtattagatgcagtgggcggagcgcataagctacaaggctgggatcgcaatctcttgaccgatagtggggggtgagatatactaccgtcccctcgcaaatcgatagtatgtactaaccgggtatattgctattcagtttccagatggtctcacttcttcagttggcgactgtcacagaggaaggagtgcgattccttagcccgcatgacggctcgccaatgtaagtggcttcgctgtaagccctataactgaacatccgaaatactgactttttatcaggttactgactcccgaacactcaatttctctccaaaattccatcggatctgatattatcatgcaattggacgatgtgattgcaactacttcgccagatcatgctcgtattaaggaggccatggaccgttctgtgcgatggctagatcggtgcattgcggagcataaatatcccgagcgacaaaacctcttttgtatcatccagggtggtctggatcttgaattacgaaagcagtgctgtgaagagatggtagcacgagatactccaggaatcgccattggaggtctatctggtggtgaggcaaaggaggagttctgcaaagtgtacgtgcctctactttcaccaaaaagaaagaccgaatgaactgaccaaccaaagagtgcatacatgcacggaaatgctgcccgagcataaacccagatacgtcatgggcgtagtatgtcttactgaattggttcttctgccttagctaatgacaaaattagggataccccgaagatattgttgtggcggtggctctcggtgcagatatgtttgactgtgtttggccgacacggacagcggtaagactcaatcaaccctccggtttggttcttgcactgatattaattagcgcttcggtgatgctattgtctcatccggaaccctaaaactaagccataaatcgttcgccgatgactttggtccagttgaggagggctgcacctgcacttgctgtcgtccaactgaccaaggtggtcttgggcttacacgagcatacatgcaccacatcacagccaaggagaccgtcggcgctcatctgtaagtgtggactggccacattatcttatttcggttctaatacttctacagtttgaccatccataatgtccattatatgttgaccatgatggggaaaattcgacaggccataattgatgaccaatacccagctttccttcgcaaatttttctccgatatctatagaggcgataaatcaaattatccggagtgggcagtaggtgctctgcggggagttggagtggacctgttggcagactcatgactgcatggccattgattttgatcaaaagaaaagtgctttgaagaaagaaatgagctattcactttatgccatagaaaagcgtgtgtatcaattccaggtgtcaagttgactgaacgtggagcagattccatcaaacttttactaaaaataagacgtcggtcctctaccctagtccaaaactatatcattagacatatatcctaaaagatggccggatatatctgtagaaagtatcattttcgaggcttcagggaagaatatcggtattccttaaagtctcgtgtagatacgcgtgttgattggatactttcctttgaataagtttgcactataaaagacgagatcggcacgtgaccacgtgtcgcggtcgacgcgatccaccgatctccaagatcctccatcgtccacttgatacaagtccgtcaaacatcaagagatcgcctgatagaacgtctctcgctaatttattctgcgccatgactcaagaccaagttgccgcagtccccgcggcatcctcgccgccatctgaccccccgcacgaagagcaccaatacctcaacttaatacgcgcaatcctctccgaaggcgagcataggcccgaccgcaccggcactggcacgcaatcaatcttcgccccaccgcaattgcgcttctctctctcgaagccgaacccagaaggcggcgagccaattcccattttgcctcttctcaccacgaagcgagtctttttacgcgccgtgctcgctgaactactctggttcatctctggctgcacctcgtcactcccactctccgaagccgggattaagatttgggacggaaatggtagtcgagagttcctcgataaatccgggctcggccaccgcgaagaaggcgatctaggacccgtgtatggattccagtggcggcactttggcgccgaatatgtcgacgccaagacggactacaccagtcagggtatcgaccagctcaaagatgttgtgcacaaactcattcacaaccctttcgatcgccgcatcatcatgagcgcgtggaaccccgctgatttgaaaaagatggccctgcccccgtgccatatgttcgcccagttttacgtctcattcccgcctggcatgaagcttgatgaaaagactggtcgtccatcgaagaatggtaccttgtcctgtctgctctaccagcgctcttgtgatatgggtcttggtgtgcccttcaatatcgcgtcctatgctcttctcacgcatatccttgcacacgccgcggaccttcatcccgggactcttattcatactatgggtgatgcccacgtctaccttgaccacgtcgatgcgcttaatgagcagcttgctcgagaaccaacagagttccccgagctgcgtattaagcgtgatgaccggggcagcgcggttgttgatggctggaaggaggatgagtttgaggtcattggatacaagcctcacaaggccatcaaaatgaagatgagcgtttgatttatataggtttctgatttttggttttcgggcactgtccgagtcactgttttgtatgataccaattattccgtgatgtatgccacgggagtatattaaaatagcaatgcgctcaaagtccgggtctacatgtatagcaaatcaactcatgcattgttggatcagaacatgcgtctatatgtaccaagctggcatatgcttcgaaaagcaaaaagcaaaaagcaaaaaagattaaacagagaatgcaagtaaatgcaagtaaatggaaagaaatgcatcatgcgctcccaagaacagcaccagcgccgcgaagcaacacaattgtgtcgccttgctttaccttaccagcaccaatagcctccgagaactcgaggaattccccagactcaacatggaagatccgcaatctcgaattctcctcatcgacccgattattaaaattctgaacccgcaacttcttcgccgcatcatcaagcacacgcccaaccttccacctcgaatcaaagaagaaatccccagccgggggttccgcagcctgcgtctccgccgtaccaacagcatgcaaatacaatctcttctctgcaggaaccgaggcatcccccttagccgatcgcttcaacccattaacagcgaccgcacgcgcagctggactattcggcttgggcttcatcttcggcagagccggcaggagagtccccttggcggcagcctgctgcttatcgcggccccaggtgcgtacgcgcgcgaacatagacttgattgtatcatttggtgaagcgacattggtctggcgcgcgcccagcggggtaatcttggcgcattcgtgttcctcgcgaagacggtgtttcaggcagtattggtggttgcactgggggcagcgcacggcggggtctttgagggtgttaatgagggttttgcactgggtgtgggcgcattggtcggtgttatagatagatggcttttcgggggcggtgcggttctcttggctggtgttgtttcttccgttgcgacggcgggcccattcgccttcgcgagggcactggtgcgcggtttcggtccggtgatctagacagaatgtgctgtggcaggattcgcaccggaaggggaggaagtcaagttggccgcagtactcgtattggcagtgccggcctagggattccaggtctgtgtcggccatttgcgtgaaggtttcgtttgggtccctggaggggctgcgccctttggatacggttatagggggcattattatgcttggtctttggaattggggatatgacacaggaaccgaaggagaatgatgcgtgggatagactagggattcgagtatgcgatctgatagaacgcgatggcacaatcgccatgtgactaatgtggggaaggttctgggcttatctagatacggagttaagttcggagttagttagtccatggaatgaacgcatcagtatgaacagggaagatctggcaagatacgagttatctcgccagcctgcgaccgtcgagatagtcgttgcagagcgaagcgactgatgatcacatgatggcccattagaacgctattatttctgagaaaacttggccacgtgacacgtacatgagaccttttgatttatacttgcttcgcaattaggagaaatatcaatgatttcaatttcttttatgaattcaagttcatcaggctccacagtcggaagaaatccccggatgggcttcttgacttaaagctactctatgttgtatgtatatatcagagttcgcgtgtggacatatcatgaaatattcgccattgacaaatgccaaattccaaagaggatagttacacggcatacaacgcatattgtaatagaaataggctagttatgctcagaaacccagtgacatatcaccccgaaccggtgtcggtactctcaaagtggaactgtcgaggaaatcctatttgatctacctgctggtgtattggtgcccagtgaagaccacacagaaatatcacttgaaatcaatctttaatgccaaaatcttggcttttaatactgaaaatattcggtgtatcatactatctgtaggcatggttcgagcaacatcgaatgtgacggttatagtcattaacactaagtagtgaaagagcctaccaaggtatgtagagtgactacggtatgtagaagtggagatatatggcgatgcatagcacccgggaattcttatctgtgacgatcatgtctatttattggagaacctgatacatttgggcgttcgctattctcttaaatgcttctcctagtttctagaggaggaaatcttagtatctttgttcacatgaagctatttagaaggcttgacggcagtagctagatcattatcttccatctatctcacacagctctcatattggttgatcacccctcattcttcagatacattgattgtactctgtacgtgcatcagaaatacgggaaaaccttttttcgaggtattgttaagctttcatgcagtcggtgcctccaaggctgtttcgcctatatttttctagttgcaattaggccagggaaatgaagacattcccacttgcttttttatagacgatcgactagtaatgtactactactcttactagcgaagctgtactaaatagtaacggacaggccggaactcttttcactgcctggttttgaaggcgaacggaaaccccactctgcagaagtcggtgaaaacaagagaaaaactcatcagatatcatagtgtaagtcaatatcgagatcgggacaatgcggggagggaccatacattagagaccatttagggcaagcatacgcgttgtcctagacatcctcgtatgcctcgaggggtacggatgtacaactcgaacttctagaatctcgtccctgagttataaggtcgatcaccgcgcggcgatctcaccaatcaccggcccgtatccagcaccggcggccggcccggttggcactgtgattggttcggatggccgaggcgttgtctttttcaggcgatctataaatgttgatgcttgatttctcgataagatgttggcattacattatagaatacgtgctggggatataactatggaggggtttcttcttccgttcactctttttttcttccccctgctttcatttccagtgcagtctcgcaaccctaactcgtttacttgatcagtgttttcccacagtaagttgtctcatggaatgccccgcgttggatttattcggtctaacagtgccaggccagttagattgcagctctaccaaaccttgcccggtcctgtctatagaccacgaacccaagactgccagacggtcacgaacggatgatatagcattgcccgcttaaaccatacatcataaaccatgacgcagcaaatccaagagcaggctatgccattccgtatccagcacactagaagccggatggcagaactactggcggccgatgtactcgttgctgcaggttcagcaacactgattacgccagcagtcatgatttttgataggtaagccaagttagactccatcttatcaacgtacgtacgttaaccaatataacccagactcgttgtcgagaaatcattctataaccaacctcttttcccggcattccgcagacacctctggttttccctcacacaacctgcaactttcttaacatcacgacccagtctcctcgtctggtccctttacacggcaacctttgccaccgccaatgcttcagagacaattctgagcaagtggtaccctcagattgaccatgccatctcaggcatgaccaccttcgctgcaacattcatagtcaactcctctgtgggcatttggaaggatgtgaagttcgcacaattattcggccacagcaacacctctataccagttacaaacaacacaaccccaccaaggacgactccaattaccacctccacctccacctccacctccaatacaagctcaacccctaaaacggcccgctcaatcggccgtaccagaattcccgtagcaacatactcagccttcctcgtccgggacgccctcacaatctttggctccttcagtctccctgctatggtctcggcctccattccggactccatcgcctcccaagaatacctcaagattttgatcgcgcagctcgcgattccagcgtccatccaacttatcagcacgccaatccacctcctcggcctggatctctacaaccggccacaggtaatgccgaccaaagagcggatcaaccgtatcagtcgcgactggattagctcgtcgctgctgcgcatgtgtcgcattatccccgctttcggaattggcgggttcgtcaatactgagggccggctttacttgcatgatcaagttagtggtcggcggaaggggccttgaggaccttatatatacagatacagattcatagataaatataccctttcttttctctttctacttccactttcaaatgctcaacggtcttgtgtgtgctttatccgctatcagtcttccccactcccgatatcaccgggccggttggttgtaggcgcttcatctcgggtcggcaagcgtcacaaacgtcaattttagactttctgactggggttgttaattttgggcgagaaatgttattgcatcactcgcctcgaagactggctgccgatgttggttgaaatataccgctgatttgactgcacggcctaaaatgatgtgttattcttttttagggcttttttcgcagatggcatgtggttatgtctgcaaacacgaatttcgtaaaagagaatgcaaagtccaaagtcaagaatcaaaatccactataaattgccttgctttatattcattggcgctatggttgtccacactcgcctgacaaagcaaatgctctgtgacggcaaagtcataggtcaaccaacctattgtgagtttatgcggtgcaaccttcttacgcccatatagaaagacgactggctttacatatgttatgatatatctccctatacatcaacactcattgggcacttttccgagtcgaagaaattaaattagaccttatcagaaggctcggcatgtttcaaaagtagcctcacagcctatggtattccgatatgtttatctctaccggagaaatataaatactagtttcttctgggcttgcttgaggagaatcctagcatgctcaaagaacattcgctttctatgcggccaatttgttcgctctcggtacttcagaggaatgactcaatgtaagcgggccagcgcagggtattccatggctgttttccgatgcctaaacttggaagccaaagcctgaacgacagccgcaaagcgaattctggtcggtgcgtcattgttggagacggatgagtgagatcacttcacccacagatggatattatcgcactgctgtggatttatctcaagttggctatctggcatggcggaggaatttgatagaagtatgaatacaagcaagctcatctaacgtcgctgtcaatggcctcagttccagacgcacggcctttggatgccgagctggtagccgaagagtcggcatggctgaaatcgtgcaaggcatggcacgggtcaacaaaagatgggtactgcccaccggcagcgttgaaagacgacggtctccacatatgctggtgagcgatattgaccagtttgccgaggaccgcaatttcgagttttagcttgatgctgtaaagtgtggctttgagggtcgtttgatagatatagaagttcctaaactcgataatcatcaaggcgatatccatcaggatacaagatacgttgacggcgagcagctgcaggatagtcttacgactgatatggtcctgatttaagcgcagcatgcgattcgtctcccacatgtacaacccagatatgataacctcctgcacacagaagcccgtcagctgcaacttctccatgacatcgtacccggcaaccgaggccgcagaactggagaagttggccgcgtacgtgaggacggttgtgggcacgtgcagcaggaaaatattcgtgatgatcatggttttcaccatacgcagcacgcgcatgttctgaatcaccagatggaggcgcgaatacagcacgaatgattggccggttaccatggcccaccaaccgactgttaagagcgtgacgggcacccaagtggcagatgtcagattaaagaatttgagcaggtagccgaccgaatatggtaggattccaacgctggctatcagcatgctccaaaaataggcgccttcatagcgtttgaaggttaggaaaatgagcacgactagctcaatcacgttgtaccatgcgacgctgatgaatgttgcgatggtgatacggacgccaatactgtcgcctgtataactgccagtgatccagttccctggactggagttgctgagagaggacatgtcctcattgggaagatctaatatgggaagaagagagcacacggaccgtgaagtgacgtgttttggggtttttttctttggcggggttgctcctaatttattggaggctggcaggcttttccgtcctggccccaaggggtgccaagtgggccaaatgtaatagttggaatttattttaataagatcaacatcaacaattcgtactagatgtgacccacttgtcgtgttccttgatgcgaggggtcatgataatattgtatacggagtacggatactgtattttcctcttgatttacttcaacctgaggcggaagctgttatacgttagatttatcattccagtcttcctccagtccggaagaatttcaagtctagaacctctgccatgggactctccctgccgttactgccggcattcagtcacatcactgcgtcacccataccagatctgactgtgctggaagattgagcctccccatgtatgctcctagcataagcccgatcctcttcacggcaaagataacttggcataacaccgacctcttgtgctggcttcttcaagcctcgcatcattttcagatcataatgatttcgctcggtccgcaaaagccctaagccccttgtgacaacatcacctctctctaaaaaacgaagctcgcattatccggttgacttcacttcgcggtgaccatcgcctcgcacttggtcttctgcgtcgtaaaagacaagattggctctttgagcaaggcatgcgggacaggccagacggcagtagatcagatgaatttgacaccgtgggaaggagtgcgatgtgtatgggcgcgatcatgggaatttcataattaatcgggtttgatcaatgtcaaagtgaatgtcgatggactattttgcgctggaatgtacctaggaataggatggcgtttacccgggacctcgggaagcccccaggtcctcatttttacgagaatgcggaggtggcgtagttaccgtatttgataggtagacaggggccaatctgatagtatgtggccttgtattacagtggacatcacatattattattgaacgcgtggttgattctgtgtagtgaagtgtagaggagtatggactacatagtagtgttgaggactttgatcagccgtccaaacattagtacattagtactagaggtactctgtaccagaggaagcaagcattttggcgcttttttactttcaaactctgaactatatcaaaacaccaaggagaagctaaccttctgatttctaggttgacctgctggtggctgctatctatacaacatcaacaaattcaaagatatgctaatgatatagagacgctctatcaagttctatacttaatatggctatgatgctatgatgcatgataaatggatatagacttcaaccaatcaaggctacttaaaagcgagcgaaccaatcatatattggcgtcgttaaagattaactccgagatagctccacccaaggtcgcaaggatatggaaatccattgagtcttgagattagttcctttattccttcctcaactaactatagatatgcatgagtgtgtcccattagcccgtaaaaaggccaaaacaggctgcaagacttgcaagtaagtatatgtccatcctcattctagcactctcttaaccggatcaagaatccgccgggtcaaatgtgacgaaggccgaccagcttgccgacgatgtgtatcgactagtcgggtctgcgacggctatggtatatggggaggaggtggaagtccttacgggcagccacagagcaaccgaactctatcaacctactgcacaccagtcccagccggcaacctcagccacgaggaacagctgtgctttgactggctgattcaacgaacagcaaagaagttcgccggtttattcccatctgacttctgggagaccttggtttttcaagctagcgggcaggaacccgccgtgcgtcacgctgtcattgccttgtcgtctgcgcatcgtttccaacagcgattcgccgccgcgccagataaatatgacgaagagtgtttcactcttcagcaatataacaaggcaattcaacacctacgcaacaatgcaaccgacaatagctattctctccgagtagcgctgattacgtgtatgctctttatcaccctagaatacatgcgcgggcagtatacagtggggaatgcacatctccaatatgggataaagctccttctcgatatatccgcgccacgtccaccgtcatccatggttccgaccgttttgtctcccgaagaagatttcgcctacaacgccctggtcgacgcctatgtccgattaagcattcaatcagccatgttcgggcccgtgcctttatacgtgtatcttgtaacaaaagacccgcaaaccaccagtcttccctatacattcaactcgcttctagacgcaagacgcagcctagacgacctcttgaacagaatacactgtctaaaaaagcattaccacgactactacgcatcccagacaccaactagcgaccaacaaatgctcaatacacagagcataatcatttcagacctatccctttggcgtaaaacatacaatgtctcagtcgcacggctcgaatccaacaaaatatcagaaagagaccaaaccagctatctcctcctacggttgcaccacgaaatggccacaataatggcctcagtctgcctctcaccagaagaaaccgaatcagagctgatatttgacacatacaccgataactttatcaggataatgactggctttgtcgatatatggaaaagctggacaacagcagccttcagcgaagaagatctctctaaactagccaccggacccgacgacctgaaagccatctttcacaatttcaagacgatgtccgacatgaacacgattctggaaacttctctactagagctcctcgaaaaggcgtctacagtcaaccacttcctccaagcaccagactgtggtaagagtgggttcaccgttgagatggggtacatcccgcctgtatactacacggctcttaagtgccgtgttccgcggatccggcgccaggctatgagggcattgagggctgcgccgcatcgagagggggtttggaatggctcgattttggcggatgttttggaggagattattaaggttgaagagggggacttttatgctggcgatgtctgcgtcaattcgtctgttggacatattctgcctggggaagaggatttgcttgtaccgaaggtgccagccgaggcaagagtctcagatgttagagttctcctgccggatgatgttgctgggaatacttatgttagctatcggaagagggctgggggaggcgagtgggtgacttttaagcagaagatcggtatatagggggcgcgatatgctccattttgatcatcatctttcattgtttattgtacaaagtttatatcagccgtgggtcgtgatttcgtaacatgcttttcagtatccataacaccccaaaaatcccgtttcctactgttccaaattcataatgactgaagtcttatgccttgcatactgtattacttcccgcctaccttttgactccgcaaaaatgcagccacctgctcatgtcttgtgacaaaaaacatgcgcttccgatctgacttccaaaccagcacgccaatctccgcggcatactggcagggagcctggtattcagtcaagctggtgaaatccttgaacaaaaagcccgccgtagcccggagacggtcccgctccaactgccataatctgatctgatctgtcacagtaggcgggagcacagatgccgggacacccttgccgttggattgagcagcgctgtgtttccgcagctgtgggtgcgcgtgcgataataggtaagagataatttgatcggccgtgattcccatctcgattgctcggcggacagactgcctggtgattttgccagtgaccagattggggaagcggtatttgaggtttgtgaaaagggagatgagagatatttgtaggggtgatgaggtgtaggcgtagagccgatagttagtttcgatgatgatgaaaccggagctagaaccaccagacggccccactggcccagtgagggatcctgtgacaggattgctcagagcgctcgagtcggatgtaagtgtagttgccagacgggtgggataaaagcgtgttgcgtcggcatcttcctggtagacaataccaaaatcagccaggtccgcgagagtgcgaagttggttgggtgtcatgtggctcttgtcgtaagaagatccgagttctagactgctcaggaggaataggaacgagagaacctcgacgctatccatgccgatggcctcggcgctctcgacatacagaatcaagatatgccagacctgggtattcacatcctgaagcacaaatccgaacccgtctttggtgatatcgacacggttacctcggatctcaaccaagtgtcccgcttggagaagctgtttgacacccttgctcaaattgaccgtgtcacgctgtccactcatcaaggcactcgttccaaccatgtatcccataacaccttcccactgtcgtctagcatattcatccaaatcggcaatcgaggttggggtttgttctggagcttgggagaatacaccgaaagaatgagagtcctcggcacccatcagagcttgtcgaagcgaagcagcgaacgggttggtgaccatgtacgcacggacgttttcacctgtgagggtcgtagaaagaatgtgaagtcgacccaatattgaaagcgcattatctcgttcccttgtgtgaacactgtcagtaatggctagagcaagacctgtcagataagccactcacttcttgctctctgcgttgacccaaacttccagatcagcagttgggagagggtctttcagatagagtagagccatcacaaagcattttgctatattcagtgttagcacaacgttcccttccgtgtgagtaagcttaatgtacccagatcgggcagcatgcgccggaagatcgcaagggctgtggatggttgttggtatagcttatagaaagtcgtcccggggagtccctccaggtactccagaggacgggatgttgcactcgccatagtgagctgtgagaaaccaaattcccaggcaactgaagagaataaggtgcctatgtgaagttgttgaatgaaatgacgctagtacggtggccgaagcggccataagtgcagctccgggatgcccccgagtcaagtactggacttgttgaccctccctgtatcatttctttccatatccagcccatttatcacttctgagaaatggcttctctgagatttgttcgctcggtaatttttcaaccttcactacctatcattcactcttgttaatgcatatctatctataggtgtgggagtccttccgagctacctcgggtctggagcctcggtatggaaatcgtcccaacttgcctctacctttgagatatcagagaagaactaacgtcccacttcaattcgattaaaggctgttgagtaatgtgagtatgcgccagtttcccaaaggttacattgaacttatcactgacctctaccatagctccgtattacagccgccaggcccggtgtagtgaactttgagctggatattcagaaggagcatacagtatgtctcgatgtgctgcagtctctctagcgcatgtctctgggaatttttctcgggactcaacttctcacatggaatgcctctgacactttcagaaccgcctgaatatcctccatggaggcactattgcaagcatgggtaagagatccttgcatgtgatcccaaagttgtgatgcttggctaaaatatgctctagtcgatctcggaggctcgttggctgtggcatctcgcggcttgttctcgacgggcgtctcaacggacctgaatggtacgtttatgaaataggcatgcatcccacctatcttctctgtttctaataaatcctctcaagtcacatatttgaactcaggtggcagagttggtgaccgaatcatggccgtatgtctttctccatctatcccgatcagtctctcaatcctactaaacgggtactaactttgacgttaggaggtgacttgtgataaatgtatactacttgacttcttcgtcacaccccctcttctacttgataatggccatcaactaactagccgcgcttagttggcaagacccttgctttcacgaacatcaagttcacgaaccccgacggacatgtctttgcccgcgggagccacacaaagtgtgtatcttatcttatttccgattgtaaactgctaatgtcgcttaggtacgtagcccaggcttggaaggatcctaataactttgtggaggaaatgaacaagcacaagggccaataagaacgaaattgggtattacgatgagaccggagcgttttggtcccaagtcttacattctatgtacttcaagccattgagaaagacatccggagaaaagatcagtcggcattgcagcagcaaatccgagtcgtcagaattatagaagacaacaagtctgttcatatccccaaatgataccactctgcttgagaccagaaatcttacgcaagctcattgcgtgttactatgcagtagctaaccatttaatctgtaaattgaactgctcattggagacgccccccagagtacaaaagaagccgagaaagtgaggtggtctcaacaaactcctttattgagcgctgctgttaccatttaacttatgaaacaattcatacaagatcttcatccccatcttcatcagcccccatagcctcatcctcatccaaatagtcatcttcgccagccggtgccgcatcctcaatggtgatatccccatcacccatagccttaatcttggcctgcgtcatctcgaagacatattgtccaaggtgctcaacactctccattggcgtaccctcaatggtggcgttagcttcccgcgacgaagggaacatctcgccaggagcaagcatgagcttatccggtcgttgcaaaagaaggtcgaatgcgggtttaagttcgtagcacgattcgaagacttcccgtcggccgaggatatacagacccagtcgtgcgcgcgagagagctacagtcaaacggcggacgtcgcgtagatatccgacgctgcgggttcgggtgagagaaaggatgacgtctagaaaaatgttagcaattccaatattccgagtgatgtgaatatgcttctgggggaagtcaactcacaatcattctgctctccctggtagcgatccaccgtcgtcacaatcttgggcattccaaacatatggttctttccacagcggtgactcaatacatcccgaatcagagcagtttgcccagcatatgtggctaagatcgagattttagaagcagggtagcccaagagtcgcatgtactgatacatggccactgcgtactccgcttcgcccaaattctggataaagtggggtgttggctcccgctctccagagccctggtagtcgggcacattgataaattggtagtcgaactggaaaccagcattggcctgctggtactcgggggcactttcaaccactggaagatccccgagttccttgtaccgccagcggaagagctctgcaatgctaggtcgtgcgcgtccctgcttatccaagttgatcactgggacacccaaccgcgccagtcgcaagaagagactttgctcgaaatgggcatattgacggaaacccatattctgaatgatgggtgaattctggtggtgatcaccacagagaacaacacgcttgagaggaagttcgccgtttttcgtattttgcagagcgttgggaatgaaactctcaacttcagtaatctgcgcggcttcttccatgaccacgttgtcgtagtggaatcctagatcggcaatttcttgccggcgcatagctgcatgagtcgaggtcatcgcgataattcgggcctcctttatgaggagatagttcgctttgtcgcgaggttgtcttaggatctcgaagggccggatgtcttccaactcagagaagattcgggcaatgtggcgttcgcaacctgcagcagtatcgatgatcgcctccttcgaggcttcagcttcaaatatgggctggggggcatttgcgaagtatgattggaacgggaaggatgtaacaatctcttcatttgatattccttcggagttggctcgatcccagaatttggcccatgttggctgcacgtaaactgtattgaagtagcctgcagtctcgcatgagtttccatgcgcaccctcgaccccaagcgatgctgccaagcgcatcacttctgataaatagtgattacggttgtcaaggaaggattcgactcgtccatacttgctgtagttggaatcagtgtccaattcttcctcgccgtgacccagtcgcaacaagtgccgttcatcaatgtcaagggcgataattttctggaataattgattgagggcttggttgctgtgtgcaatgagtagcgtccgttcgttggggaagttgtggtaaatgttgttaattatttgagtggtgacatcagtctttccagtaccaggcggtcccacgatgacggtgagtccaggctgggttccagatgctatggcttccacttgggcgggtgtgaatcggattttgttcaatttgggggtgtcgacggggtaggggccagggtttggtggcttgtatgtagaaacacgcatattgctaggcgccaactctgtcgctgcagctttttcccggcgtcgcttcttcggcgcgtggggctcttctgcaggctcttggttaacatattcaagaacgtagggtggaccaaagctagcattctcagcccccgaaggttcaatgcccgggaagctttccactaaatgggaccagtccaaaagggtgtctctaaagtcaacagtgctaagtcggtttggcagctgtgtgtattgagcactagcgggatctccatagcccaggaagatgtcctggagccaggaaggaagagtcatatcagagacaataagcttttgcatcgtctgcaggattgacttgaagttattctctctgccctttctccgtgcaatcacgttaatgagggggtaaatgtctggtttgccgtgggcctgctggtccttgtcggctttgaatgcagccgcatccaagttgacaattaatctcctcgatcgtgccctaggatgagagccatttgcctggccagaatgttgtcgcaatgcgcggccttgctcgtcaagtacttgtacaatctcggccgttcgaagatgggtcatccgaggggcttcaggtgcaccttgttccgactgtgacgagctggactggacggccagaagataaacgacgtcatcaggtcggagtgtgtcccactctcttctaacattatctgcaagccttcctacctctatcgcgatctcagctcgaacaaaagccggatttgttgccccgaccttgggtggtgcgacatcaataatagcaggctttgaaatcgggatggccattcgagagaatccctcaaaatttaaggttccatcgcgtgctgccttcggctgcatgcgtttaacgagggactccaggtccttgcggatttggaaaaatgcttctgatcggtagagaaggaaggagcgataaaggaaatctccgagactcagatactggagattcaactttgggattgccagaggcctcgatccgtcgtatgtctcattcctcaacaaggccgggtcatagagggtttcctccgtcggaagtggactcaacttctcgacagcttcttggaaaggcaccttgcgttcataaaaagatgccaaaacttccagataaaactgacggtctagagtgacgtccgaggattttgggtagcttgttcggaatcctaggtgagagcaaaggctctggagttccgactcgtctagagcagatagctgtccctctagatccactcgctgcgcaatcgagcccatattggagagcgcgagaatcatgagcttatctttgaataatttcattgaggatctttgcagctgggccaattcctggcaatgcaggtcgtaaactccctgcggagaaagagcctcaccagagtaatcatcaattgcaaattcgacaaaatgtttcagaagactgtggaagtcacgtagaagggcgttgtcgggcacatggtagagctgcgaaaggcgaataaccgatagaaggttgaggtcctttaacaacgtgttcacgtagcgcctagtgggaagctgactttcgagatcaaccaagagctcaaggaaacgctcacagtacagcaagttctcagtctggtccttttcgggtccgttcaacctacgaaggaaatccaaaagcattgtatatagccatgaacgttcgaagcgcatcttcgctttcaccgcttcatctccagcctcgtatcgcttcccagaggccctccacgccttttttaatgtcggggcctttgcaataatacgatctctagtctcctcactggccaagttgtgccagatcgagatagaaacgaggggcgcgcattccttgcggattaggacgttctcgagtgactgaaaggcgctgattataaacgatatgatagagagtcgagagcgagtcggaagtgaatgatcaatgctcattgagagaatacggtggaagagattggagaagtcatcagcacggtcggagaagatatctgcaactgtcagcatcgtcacgttatagatctcgtcgtattgactcaccccatatcggtaagtgctcgcgatgttttacactgacgatcaatgcaatcaacagtacgtgatgattcgacgcatcctctgtgtaagtcggccaaaggaacctcgagaacagttagcgttagccttggaggcatgactagagaggaacgtacttttcaagaatgttcaagttctcaagaatcaatagcgagtgactgttgaaagcctctgcttccaaaggatcccacaattgcttcttgatgacatctggtttagccttgcggaccttcgtgttgagccagtgggccttggctagctgcacccacgggttttcttcacgaaagtccaccactgtaggcctggattcgagactctgcgccatcgcaggagtcagtagtttccttaacctaataaattggagtggtcaaggaggggttgattggcgcagtcgggaacatctgcatcggtgaagctggggggagcttttcaaaaagtcttggctctgagttccgccgagccgcagtcctcaatcaatccgaccactttgtttcccttcttcctacattcatctaaccttttttcttcccttcgtaacctctcttcaaagaacgactgaggagaacccttgaaaagaagctgaagaccgcaatcaaggaagtcccaaggtcctagaagacactcgacaaggcgcctacggacacgctcgagacaacacttcaagacaacccctcaagggccccttacaaaggcgcctgggtagacgcttcaggaaatggcgaacgatgatattggtggtgttcaggtctacaaaagactagtggacaatctcctggatcgcgccgcgcaggtcaagcccgacaagcagatcgaaccccccttgaccgaaacatacctgggcgaatcgatatggcaagtgccgtctgaggatgacaaggttacaaagcacttaagcccacagactaagcttgcggccgtggaaatcgcgtttcgcgagaagttctatcgcgttttggtacggcccgtacaaagctctagcccccagggcatcgttaacagtttgttataggcctcgacttccatcggtgaccctgctttcattcaaatatggaatctccttgacattgtctcgatattttctgataatggtcagtctccgcagttcctccgcagtccctaccgatctaacaatcaccagaacaatgcgaacccggtctgattttctggctcattgaagagctcttggatagtcaaactatccatggctgccgtaaggtgtttgattacttggagtcccgaagagagaggaacaccaaggtcagcatggcccctcatctactggatctgttgcaaagctgaccccgcacaagaaacatttcaaacagaaaagcttagttattctacgatcatgcaacgagcttcttcgccggctctcgcgcgcagaagatacagtgttttgcggccgggtgtttatctatctcttccagagtttcccacttggagacaagagttcggttaaccttcgcggcgagttccactctgagaatgtcacggcctttgacggaattgcaaatgagtctaccgataagcaggagcaggatacaacgatgactgaaggggctgaacccacggcacccggacaggcagcggttgagacctcttctcagcaaacatcgaaagcgcccaaggtcgttgtttctactggcgatgagaagaaatcagatgaagttgacttgaatgcactctacccgctcttctggagccttcaggcctatttctccgcaccgagcaagacgttcgacgctgaacggtttacatcatttaagactggaatggaagctacgctagctgcattcaagagcatcaatactgagatggaaaacgagagctctgcccgagcatcagaagatgcccgcaagtcgaacaagcgcaagcgcatcgcggatggtactgaagtcgccaccagtttcaacccgaagtacttgaccagccgggatctatttgacctcgaaatcagcgatactgccttccgacgacatgttcttgtccaggctctcattcttctcgactttgtgctttctctcacatcaaattccaaatcacgcctggcgaatacgacgaacaagtccgttctttacggtttcacattgaacgaggaggataccaagtgggcgaccagcatgcgaaaaaacatcgaggaatatttgcaacaagggcccggagggaaattctattatcgtatggtggacacagtcttgtctcgagacaagaactgggtgcggtggaaagccgagggctgtccattgattgaacgattggccatctcggcggcggagtacaaggcttcccgcgagcatgctaccaaagcgtatgccaacaaacgccttcgtccgtccccaatgggctctctcgatttgaagttccttgccgacaccgaggcgctggccaatattgaacgtctcaaggaatccgaccgatacaacgttccttccgccgactcgttcttgaagggcatcatggatgatgaaatggacatcgatatggcgatgactgacgaggacaaggcgattgccgagggcgctaaagccagcaagtcctggcgaatcttgcgtcttgctgcgaaaggaaagcttgctgcattcgacaaaattggagagggcaacaacctacaggtcttgtttgagagtgctacaaccgcggatgatcacaatgagctcagttcctccggcgataccaaggatatctcccaatccctcgatggagctcagagcctgcctcttggaaccaaagggctcaccgaagcgaccaagactgctggatccgaagagcctgttgaaggcaaagtcgagacagctcaggatcttcacgatctgccccagggcacagatgaacgggaaatgcaagtcgaaaacaaagacgtcatcagggaacaacaagacccaagcaccgataacaccagggaagaggcccttgccgccgctagcgcctcgagagaggactctgccacgtaaggtcagattgtggcttgaagatattccgttggatagtcaatggcttggaccccctttttgtccggagaaaatcctccaatggacaccatctaaggcggtcacgccgcggccaaccacatccagattatccaggcaacctgcaggattttatgcatcaatatcacgaagccgttggtgccatgatctgggagcgagattaccacatccgtgcacctgcattatctgcgatacatctgctggtacggttcagcacttggtttctctttttcaaatacgaattacggagtgcgtcctaggtcatccctgctggcggagttgaatcttcctctaccctaattgggtgtcatttcacgagcttcttttttcttttttctttttatttcaagaacccgcctattcagggtcgccctcggtccagattcgtcggggcagaattgacaaagatggcgcttaaacagaaacagaaaaagaaccaattaggcccattggctgattgcgggcacgactcctgaaccgaatccggcattctacgggcagcgggccaatgacatacgacctaactatgttgtacccaagactaaagacctcgatgaattagctaacgtggagaccatctgggcacaattcttttgatcggcaactctaatacaaatgacttgaaagggttcctgcatgaagtacggagcagctaaagtagaaaaaggaataatcgtgttctgtccatgttctccagacctcatttattttcacacgtggcatgtttagtgtcacggtcatgtttcactttttttctatttttctatttttctatttttctatttatctttttatctttttatgtatgagaaagcagggggtaaggattaagcgacttcggaaacgagatcagtagggaaaaaaaggagagaatatggagtacggagtaaatatccaggattacggagtacattgtacacgagatcacaaaagcaaagtgtccccattgaaccattacatgcagaagtgggcaccatgtttctcccctgtccacttgggtttggccccctatttttcgcgagcctagggaagaatccttcgcttcgacggagtagtttgcgatatagtacactatattggcgaatagcgtgcactgatcgtctagcgttcgatgcgcaacacgtataagttgtgcaatcaataaatcccaagaataaaagccacatgggaattggaacactatcgacacaagcgttgagtttggtctccaccagtggaggctatacaagagatagaaggggacgtacaataacggtagccatgtggttcgatctgatgcactggccatgtgggtatgggacggaggacggagtatggatgtaccgacgagtgtgctggacataaaatccgtgtctatcttcgttctaatccggtttaggcaaatgttgatgttctttctagatcgggaattgtacagatatatatatataggtataggtgtatgtacatggacgtgcggaggcactcacatactcgttctattctatataggttctatccctattttatatgttgccagaaataccctgtatactcgtatactcgtatattcgtatactccgttatggaatccgccaagagatcgacttgcgtcaccttaatcttctaaagtccgatggtataatacccaggacgtgtaagtatgcatcccctgtacgagtacgtggcttgctactccagtgtacggagtacggagtataagtggatggatgcaatgcctcggtacggaagagataaagtcaaatgcctcgatcgctcgatctggttaccccgcacagcacgttccagaagggagattgcaaggacgtacacatcatacgttgcaacggtatgatcttgatctttcctttaatttgaatttggccgtcagggttcaacacgaaacaaatcaagcagaaacaaattggcctacgtagagatcgtcactccgtggtgtggatcgaaatccaacggctccgagttttctcctccgagatccacctgcttggggaacctaagcggtatgtaacttatccgtacccttgatatacatgatatacaccgcgtacagggaggcaggcgctggatatcttcgaagaaggaaaaccgagaaacccgagaaaccgatgccccaggtcctatccgatatatccgatgtccttcggcagaagtcctgacccacatggatctctagaaaacgaaaagatgtatcattgacgagtaccgttgacgcctcatttcacctgcgactcgaattgtttcatatccattgtggagatttccaggggagctgtgtgtctccctacaactaccgggtggtatatcctcgctaaaaaactccttaactaggtatgtaattccgagttcccgaatgcgacggcgcaaggcccgcttggtggtctttcctgaagaaggtaatgcagctctcgaaacttccttgacgaggctcttccaaaggctatcgtacaccgtttcaagtattgctcatgtggttctacattggttcctttgactcgggcagtcctgatttgcgatgttgatgctccttatatagagattgtgtgtttgagagtcccctttttcccgttttgccaatttcctatttttatttttttcccattctccaagccttttgggcgctatctccacccagccctcgactgcttcgcttctttccgaggcatttcacgatggagctgtggcgggcagcccgctgagtggctgttcctcttggtccttgatcgatagccccgagggtccgctcaggatttatggatcttcagcacgccactaacacagccgactggcccttcccacatggcctggtctgcgcatttccggtgagggtcttacatctgtactccgtaacggttgcaggaatcaggctttttgtttgaactctctcgtctgtccgacggattacggagtatacagatcccagctaagcttccacggccaattccaaacttttatactagaaacgaaaaggacatacaagtaccgcactgtctcttctctctcctttatcttcccttagtttcgcttttccgggtgccgggtcccgcgggacccattttctcccctttatcgtccaaggttgagctgagttgacgtggtggttcccagccttgcaacttggacgattcccacattcccaccacatgaatcctggtcgctcggcggtgtccgttatggtgacagcgtcttgtttggcatactccgtcctccgtacaataggattccatcggctctcttaccccgtattctgtcggcatattctgtacctgtcacttcgtatccagggacgcctgacgggtaaaatgggcattggatcggaggctacgattttattctccgagacgatccttttagtttctgatatgatactagctgtctgtaccgtcccataccatctgtaacctgtgttttacaaacgaggttaacggccaccgctatggaccgtttggtataggatcttcgtccaggcaaaatagatcgaatgttgatctgtggactcgagtctatgttatgttggactttctacattgtacatgtacatcttcgtctcatgcccctcaggctccctgagaatggatttcgctgaacggcctgcatctgggtttttccttttgaaatggaatgtttttagagaggacaggcctaggatgaatagctaccttctaaccatactatcccatgccatcttgtatacatgggatttatcgggtggccaaaatggtggaccctggcgccattccgtttaatatccctgtatttccactgttacctcgcttggctattaaaacctatttgcctcacaggatatctccggtcgatcctagtctagcggcattgtgtgtccaggtaccacatttcattctggtggatgcttctctctcaacatcttatacagcccagtaactgcccagctgcgtaacgatcatcagaatcaatcggaaccgatctcagatccaaagaaaaaggaaaaagaataaaaaaaaaaaaagaataaaggttggcgacagttgtcccgcttgacatcttaccctcgtttgggccttctttttccctcttttctcctcttcacttgacacgcatactttttggcgcctttaatcgcctttcttattttctctaaatcagaaacaaagcagtcttaccctttactctaattgccagaagaaaccctgaccctttttttttacggcacttccatcagacccaccaacgtctcatatcggggggggggggtgtctacggtatcctttttgggctagaatttctcctattgcttctgttgacgaaagtcttgactctacttctttttccttttcaaaagagaattcgtctttggttttgaattatcgtgggtaagggcaacacacacacacacacacatacacgcacccgcacccaaactagacccttaccatgtcagtcggtggcccttgtctttggttgccttctttatcttcgccagttcattcgcccctttctgcggtttcatctcatctatcagcccgcaatagcgagagactctctttagggcctaggactatctcaccacggctatctgcgcagaagaaagaggagcctgccgttcctgttcctgtgcacgttcccgctcgtcctgtggagatgcagccgactggttataaggctgaaaacgccttgaataacccggcggcacagcccgtcagcatgggctcagcgccgtacttggagagagatgtttcacaggatacggtcaaccaccgcttggaggcggcgaaacaggatatgcttccgcgtgttaaattggagatcccaagtttgaatcagcggggctttttggctgttcagcccctggtcgggcacggcggtcatcccgaggaaatgggtatttcatcgttttcgggctcgcatgaccagagagacgaccacgacagagaatcgacaatcagtcctgatgacgataaggatatgatgggtagcgatgacaatagatcgccttcgatggagaagaagaagatgaagcgttttcggtatggaatttcttatcttccaagtaccacgcatggttgctgacagaactatagattaacacataaccaaacccgatttctgatgagtgagttcactcgccaggcacatcccgatgcagcccatcgagaacgtctgtcgagggaaatccctgggttgaccccgcgtcaagtgcaagtctggttccaaaataggtagggtgatcaactagttgaatcgtctgtccttgactaacgtaggtgtactgtcaggcgagcaaagctcaagcgtctcactacgaatgatcgggagagaatgctcaaatctcgagcccttcctgacgatttcgataccacaaaagttctccgcacgccctttgagggcaaacaatcaggtatcacgccagtggcatctccacaaggctatggcgttccgaatccggatttcggggctttgagaacactgcgtaccgattgctacgctcgaccaaatgaagacgactatctcgtctcacctctcagctctgcatcgacagcaggaacctacatgtcctcgactggacgaaacgacagcatgtctcagtcgaacatgatgttccgtcctgctgcgtcttcctccatgtccgatttacatagaaccatccgcaacgattacccggtcaccaggtcaagtagcttgtccgatgcatcggcccatccatcgccgtatgcggggtatcctatgcacaatcgtttcgcggggccacagccaaatcagccagctctaccctatatgagacgacccatagaatatgccatgcctcgtcatccaggcatgggaccttatgatcaacatcaaccgtttgagggctcggtgtcaccgacagacactcaaggctcacatcttacttatgacataaacaatctaggttagtatctttttccttgcctcgacattctccaacccgatttcctaacatggttttatacaggcccgcaacaacagggctacaatcttggaatgggctctcaattaccaccccaaggccgacctatagccaccatgcagaacctgccagtctcggcagcacaaaattatcggccctattcctacgacgccaccgcaggcccaatgggtacaccaattccttacacacaagcaaatacctcgactctgagtctcccaacttccgagccatcatacaactaccccaactatatccagcagtgagaggggagtaagacatccttgaaaaaagtcggctgttacttgtctgctatacgacatgctcgttttgctttccgcattttctccttcgtctccatctcatcacctccaccttttggttaactggttagctgggttaaccaaggatccgcgatctatatcagcgagtattaatcattaatcgttctcatagcgttcaccgtttctggtttctgggtttcttctttgtcctgtgttatcaaccatatttttaaaatctgtttcttgcatgcatctacgtttcgtttgttttcatatcatctttccgttttgtcgcgtttctttgggtctggtctggtctggaatctagcgttcattgtctgggggacagtttgtctaatattaattgtttctgatctcgctgcatagcctcggggtggaaggtcaaaatggtatagagatgccactgtgtttagaagcagacagaccactgagtctacaattcacttgaaccaataaaccaagttgtcctcgacaattctctactttcatctactttcatgccgccgtaaacaatccaatactcgacaaattatgtaaggtcgtagctccaattaagcagttccaacctccccacactaaccttacaagtacaacccagcaacataggtcatccaaatcctgcctgtcgaatcagagtcaagacaaaagtaatcaaattcttcttgtctcagctcatccaccatcaggccacatcgtcccgccactcaagcgacgtctatttgctgttttccgcaatgggccaatcagcgtccacgaaagataacactgtaccacgtgacacccactctcacagccaatcaaggttcagctattgataatcaccactcatcctctgacgcatgcagaacagtataaaggaactcgtaaaagcagagtgttattttctttctctcacacactctcatcttgactcaaagcaatatcatttcgaaggaatccatccatcaatcttgcaaactcacaaactcacaagttcctcaacttcatcttacctctcgatcttcagaaaccgacgtcatatcaaatcaacccgccaaaatggtccaccccactaccacctgctgcaagaccacacaggacggctcctgcgtctgcgccgctcaggctaagtgctcatgtggccagcagagcgccctccactgcagctgcaacaaggcttcctctgagaacactatctctggtccccgctgctcatgccgtatgtgatttccctactctagtgatttagaataaactttatactaacattgaaataggcactcgcccagctggccaatgcacctgtgagcgagcggtcactgagaaccaggctgtttctggtgagacctgtgcctgtggcagccgtcctcagggtgagttttctcctactacgaatgcgattcgtgttattcaatgaatatcctgctaacttcggctttagcttcttgtacctgtgagaaggctgctgctattgattccgcccttgaggttgacttcactggcagtgcttaagtgacttgattcacttgtactttttgctttgatggggctccctatcattgaaaattgcatttttgtccccgtcttgatggggtggcgtcttgggcttgggcatttttactgggtgaggttgcttagggttatcaataactgctggatgagatacgagatgcaaatttaatactattcacggcctactacaatatacagagaataagttatcacgagtaacaacaggttatattcaatgcgccaaagctgtaaaatgggcttgggtggcttcgaaacgggaatatacatacttcttaaaatagacctacgtacttgatttcctctgccacttcttggctatccctttccgttttagtgctcaggctttgccgcttttgctcactgagtagaactgagcatcacctgatcattacataagccatatgactcgctcactgagcgtcacctaagcgctctgatttgctcactgagcaccacctgattattacataagctcaagacttgctccttgctcaccggagcaaagcacagggagcagctaagtcagcagctcacctcaataaaatgcaccacgctagccccatccaaacgcagtcgttcacccggcactcttgaccgttgtcccctcaacgaaaggctggtgtcatcaatttggcggtcgatcctggttgttacgcctccacctggaaggcaaatgcacagtggggccacattattggctttactattctgcgcctatgccactattcaacctcgccgagctctacatagttgcggaatatatccaaccctccatttttggttctacaatatctttacgcctctacctagaaggcaaatgcacagtggggccacattattagctttactattctgcgcctataccactattcaacctcgccgagctctatatagttgcggaaaatacccaaccctccatttttggttctacaatatctaggaatatcttagaaaaccctagttagaggtttataaatctagtttagtgttttattctgattttttttagttgattttttaacggactatcgctcttgctcccgactgcttactcctaggaatacgacttcagctctagtgatagatatccgcaaaaatattctagacctattgattatacctactgtatgatctagccgcctataacgaaatttgcggcccctcatttatctaaaatattctaactagcaatcagaaaatacctcattctaactaaagtctgataggacttcctaggagctctcagacatttcgtgccaccacgatatgattggtgagataatatagatcctaggagcttaagtactggtacccactcgcgagagccgtgagtgctaacgctgagagtcaaagtatataaaagaaatactgatcccttctagagtgaacatatccaagtttcaagcatttctactcaaggtcttatgaagtctgctcataagttcagcagccttcagtatcctgggtctgtctcttgtcagccccttagtaagagcaaaagcctaactattatacagattgcctgatgccacaaagaaaaccgataacctggtcgatattcaagatctcctattcgatgagagttgcaggaccgtttcctgcataatcctgagctctgagtttgttatatatggccgaggcctaaatggaaagatgtaagtgactctcgcaattttaccagtgggagcgcgagaatttgcagggggcctgtggctaatgtgactatatattatccgtcatgccacgataatcgagagcctcgcgtaccagttttcagtctgtgtcattctactctgacttataggcatcattttgccccctggccctagcttgtccgaccatgcttcttcctgtcgtaggacttaaaagccttcaatcgagtcatggtaattgagaaaatcagaagagcttatctattgaagcgaagacgtggcatcccggtttgttgacctatttagacttgacgagacaaccaaaaggccgttttctattcgctgcccctcagtgttccggcttcatattgcagacctggataaaagtctctagaactgacaagacacccgctagttatcttgttatatttcctatgtttgccaggtcgatgctgttagattacactgttttgatttgaggttcgtgcaaattaggacccaagttgcatcgtcgaaattaattatgcactaacttagaaggagagagagagatgaatgatctatgaaatagtagggtatttataccctgtagatgtagcaaaaaaacaagaatactagtcggccggcagtattttcagtaatttttccagttggtcttctcaaagtgtttttttacctactaagcctaatcaggaattttctgcaactttatatctatattcaaaggataacattgaaccttgcatcctattcttcttctccattcattccaagtttcagtctcactactttgttcttcttaattcattctaagtttcagtctcacttctttgaatctcattatattcgatttatcttcttcaaacttacccaccatgtccctccaagccattcccgaacatcatccagatctcccatccggtcctggtgttttcacactagaacagatacgatgccttgaagaggctgcaatcctccttcccgagcctcagccgaatacatccacaaacgccagtggtaaaagaaaaatttccgctgcattcagtgcaccaagatctatgtcaagctcatccaccacctcgtcgtcgtcttctgcgtctgttgccacccatggtttccagcccaatgtcatccgaaccttcgacatcccaatggcagaagaaagtgtcgaggtgcttgagtatattgggttcgtaccggatgttgccagactgatctatgaccgatattgcggccgcccaagtccaagccaaaatcctgatgacctaatggcatatgtcactgcacatctcgcctctcttagccgacgacaatacgataacatgagccatcaggaggcgctcgctgatgttggtcttacgcaccaaattcaaggagcaatcacggacccgagattctcacacatcttcggtacccagaccctcacttactgggcacaagataccgttgaaaccaactatgccgctcttcttcgtcaacagcaactgctacaaagtcatgcaaacaagcgcatagctcataaaaagaaacataagcggcccaggcatgagccgagccgagaagaccaagacccatctgagcagcaacccgtgaccgcaacgatcaacatgacaccccaagatttccagttcccagacacatatgtgatggttcagcctgatgccaatatcctcgccgatcacatttctttatacaagggcaaggcatatgatgaattagggccagcgggtgatatcattgagagtgatggaacagtcaacctaagaccactcagcacataccccggcggagacttcaatttcgattttaatgcgcaatactggacccccgaaattgaaacggctgaagagtaccgcaaatttgcagaaaggagaagccctgcagccgatacctgcattattcacattcaggttcagcgaccattcatcaacagcctccgaatggagaatctatggtattctcccaactggaaagagtacatctggacttgcaggagacaggctacccctcacccgaaattcgaccacctctggcgacctgggcaagctaatattgtcaggggccccatctgttctaccctcagcacacagctagtccgcatccgcagagaaaacatccaaagtcatatcactgaggacaacgtgatgcgattgctgtctgggagaaaggccactcggtgggtattcgttcaacgcgatgtgattgatcggttagcagaacacattcgagggaagatgcatttcatcattttcgaagccgcagttcgtttctcatgacatcggtctagggcccactttccgctttgattgcagccctttttcgggtcgttctttatttatctgttgacatgtttctttctcgaaaaatatcaccctctatggtaaaaatttactcagtgagcctgactctgagcgccctcgtaaaagcggcggcagctaagataggaaagccccgcccggtagaggaaaaatggtacgtataactacttaggtacaacgtgtcgagcctcaaagcttgtttgcaatgggaagatgcagatttttaaaacaactataatccggcctcttgcccagtgtttttgctttggattttccacatggaatcagtctgtccagacaaataaataactacaatctactccgtacacacacttacacctgccatttgcaccgccacatcggatcagtattcctccgtcgccacataccgccacagcggaaccgggctgatcgacagcggaagtgacccaaatgaaatacagagcggacaagttacggggatggactcatctcgacttcgcgtgctgcccggctcatttatcataggatctctaatttgagcgctattttgtatgttgtcgcggttcaatcggatagctccggtcccccaccaaccaaccagtgctgacaagctccccagaattcaaatccctcaacacaacacccaaccccctgttttccaagaagctcccacgagcccggaaatccaccatccgacacgttgcatggccaatgccccataatcgacacgccagcataaccgggacatggttgtgtgacgctgtgcgtccgatcgcgaaccccctgaggtgataatcccgcgtggcatgcgagggcgcacctcgaccgaaaacccccgccatactgtagtcgtcttttctttcgcatccgtgggctgataactgcactacgctatcatcgccgctatgtcgtcaatgcgagggcttgtgcagttcattgctgatctgcggaatgcccgcgctagagaactcgaggagaagcgcgtgaacaaggagctggccaatatccggcagaagtttaagtctggcaatcttaatggttatcagaaaaagaaatacgtttgcaaattgctctatgtctacattcagggttacgatgtggactttggccatctcgaggctgttaacttgattacctcgcctaagtactctgagaagcagatcggatacttggctgtcacgttattcttgcatgaggagcatgagctgcttcatttggttgtcaacagtattcggaaggatctgctcgatcataatgaattgaataactgtttggccctgcatgctgtggccaatgtcggtggtaaagagctgggagaagcgctcggctcggaggttcacaggctgctcatctcaccgtgggtttagaacggtttttgttctgtttatgattattctaacaccttttagtacctccaaatctttcgtcaaaaagaaggctgctttaacgctgcttcggttgtatcgaaaataccccggcatcgtgcgaaacgaatgggccgaacgaatcatatcgatcatggatgaccctgatatgggagtaacgctctctgtcacctctttggtcatggcactagctcaagacctgccagaggaatacaagggctgctatgtcaaggctgcacagcggttgaagcggattgtggttgacaatgatattgctccggactacctctactaccgcgtaccatgtccatggatccaggttaagttcctgcgcctgctgcaatattatcccccatcaggtatgtttagtgctctggcaaatcgttactcggtttctcacatacaattacagaggatagccatgttcgcgagattattcgagagtccctctcccagatgatgcaagctgcaatggaaacacccaagaatgtccagcagaacaatgcgcaaaacgccatccttttcgaagccatcaacctccttatccacctcgactctgagcacaatctcatgatgcaaatctccacccgtctaggcaaatacattcagtctcgggagactaacgttcgataccttggtctggatgcgctgacccatttcgccgctcgggctgagacccttgacccgattaaaaagcaccagaacattatcctaggctcgctccgagaccgcgacatcagtgttcgtcgcaaaggattggacctgttgtacagcatgtgcgataccagtaatgccggccccattgttaacgagcttcttcgatatttgcagactgccgattatgccattcgagaggaaatggtacttaaggtcgccattcttactgagaaatacgccgccgatgcacaatggtacatcgatatgacattgaaactgctctcactggcaggtgaacatgtcaacgacgaagtatggcaacgagtgattcagatcgtgaccaacaacgaagaactacaagcttatgcagcacacactctgctaggctacctgaagtctgattgccacgaaagcttggtgaaaatcggctgctatgtcttgggcgagtacggccacctaatcgccgaaaacgcaggctcaagccctattgagcaattcctggctctgcaggccaaaatgttctccagttccgacaacgcgcgggcgatgatcctctcgtcatttgtcaagtttgtgaatttgttccccgaaatcaaaccccagctcttgcaaatattccgcctatacagccattcccctgattccgaactgcagcaacgagcatttgagtacctgtcgctggcgactctcccgaccgacgatctgctgcggacggtctgcgatgagatgccgccattctcagagcgaacctctattctactttctcggttacaccagaaaacagcaggcgcgagtgagaagaagacctgggttatcggtggcaaggacgcgaatgcggacaagcaggaaatgctcttggcacagaacaccggtctcaagcgcaccttcacgacaatcgtcaatggtacgcgcactgggtccggcaatacaccagccagcccggcaagcgcgtcgaatgcggccagttcatcgggcgacttggcaggcctcgatctcagcggtcccacagccccagctcccaacatggccagtgctgctcatctgaccccagaatgggacatcggctacaaccgactgtatttctcgcgcgagggtgtgcttttcgaagatgcacagatccaggtcggactgcgctcggagtaccgcggtcctatgggtgtcgtgaagctttatatctcgaacaagtccacgtaccccatcgggtctcttaccaccaccgtcgacaacccggcctctcctcagttgaagatcgacacgaggaacctgcccgaaccaacagtcgcggctgccgggcagacacagcagactctgttctgcaccgctcatggtcccttcgcggatgcgcctaccatccgtatctcatacttggccggtgctctccaggcttacacactccagctgcctgtcctgatgcatcgatacatggaatcctcgtctttgtcagccgaggagttcttcaagcgatggcgccagattggcggtggacctctggaatcccagaagacctttgccttgctgggtaagaacaagactaccaacgagaggttcactcggaggattgtcgagggattcgcattcaagattttggatggcgtcgatccgaactctcagaacattgttgggtgcgccgtgtaccaattcgaggggggtaagacgggctgtctgctgcggctggagcccaactacgagaagaaggtatgtatcagaagtcttccaattcgtttcgtattgtcatgctaactctttcgttcagatgtatcgcgtcactgttcgtgccacccaagaagaggtccccgggccactggtcaaacagatggagctgaagctggcgcagggcatgagagcagacgaagccttcgattaaagcgtctgcaggtgatatggaagcattcatgtatatctctaattgaattatcgagtaaaatattagcaaatgttcctggcggaacatcgcatcttttgtataatccttgtcagtttagtaacaaatagaggtgcgatatgctatacatgcatctaatgatcagcattctcagcggtgacaccagaagcccaaacacttttaatcttgacgaaatcgtaactcataaccacccccagtcctaagtcaaacaacattcgcctccgccttaggcggccgatccccaaagatcgtagttccaaccctaacctgatcactaccaagagcaattgccccctcaaaatccgagctcatacccatactaagctccaattcagcctcatccccaaccaacccaagctccttaacaacccgatccctcgtctccctcaaacaaacaaaatcctcattctcattctccaccgtcgtcgcccgggaccgcgcaatagccccaatagtcatgaaaccctgcaacttcaaccggggacactgctcacgaacatatcgacacagcgccggcgccgcagcaggctcaacacccgccttattctcctcgcccgacgtattaacctgaacatagatacgtagcctcccatcctcgtcgtggttcgtagccgccacctcagcccccctctccccccaccccttatccagcaacttcgccttcttttccgagtccacgctctcgacagcccacagtccgcgcacgtcccgtgccagcgtcacgcacttgttgctctgcaacccgccaatgaagtgccatttgatgcttgcgggcagcagccgcgatttctcgagtagttcttgaaggtagttctcgccgaagtgcacttgcgatcctggcgcttggtgcagtgccaatgcgtcggatgcgggcttgagcttagagacggcgacgaggcggattggtttactggggattggggattggagggccgctgtgctcactcgggcgcgcaccgatgttaggtttgagaggagtgtgctggcgcgtgctggtgttgctgggttcattgttggtggttgcgatggtgtgttggttgtcattgcaggttggtggggttgttgttgatgttgttgatgttgtgttgattctgttgattctgattgttgttgacgtatagatttgttgttagggttttgaagaatttcatataagttcagatagggacttcaatgatgtgttcagtcaattgagttgagatgaatcaaatccaagctagtcaggaatagaaagttagactttcgataagggccttaggcagcaatttcctcggagaatattccgtcgcacgtgactcacctgcgccacatctggccttgcgcctcaccgtctatttcgcttttccgtttgcatctttgaatcgagagatccgtgagatcatctacatcctaagaatgtcaactgacatatggagtcctccgtacaaactctatttctgcagtcatccggtaggcaatcccgatgcgagatcctggcggcaagccagacagacctctgctccaatcacagatatgcatcgtcggaaaagagactgcggagcgccgggtatgggcggatcccctcagttcgtctcaacctgtcaggactgactggctctcggctggtcttgtcgatcagattgtcgccgttgggtttcaaactagtccctcgatgcaggatcttgatctctatttttaattccgtccaacctgttgaatcagaaaatagccgcctgcttgtctttttctagtctttcttctgagactcccatttgcattacccccagtccccaccagagcgccaagtttgctgcctagactacctgtccaagagccaaaatagcggtaccgagttcgatggcgccctcggcgagaatacgacctggtgtcagatgcaacctgccgccgacggatggggtaaggtctaggcaaggtataagcccactaagaatataactataataatacccatcataataagcaaaaaagtttatggtctctttgacgtcagctccaatcaatagccgtggttccattcatagacgcggtcaatgactattcactcatcattacatgaggcctagaagaacttaaagagctaataggctgctcttctttgcctattctttttgcttgctgatcaacgtcgtcaactctccatatcatcactcatttcagctggtctgaataagccttcaaatatctgagcatctcgacatcaccagctacaaagcatactttccgaggttttccgattaggcttactagctagtcagcgacgctcgaaaccattcacacgccatttacacactgggcatttgacatcctcatatccttgccatacaccatcatcaatcttcatatcgcagtcaatctgctttacatattcaactaccaccaagtccatatcgtccatcgtccatcaactgtcaactgcaactgcaaatatccagaacttactgtgggaatcggcaggacgccccgcaacggtcaacagtcaacagtcaactgcaacaaagaagcatccaacaagagcattatgtgtcgccaatacttcacactctacgaatggtgccaatgcgaagaagacgccggcaacagcgtctgtgccgcccatcgtcggaataattgcccgggcatcagcgtcgagaccgtgcacatgcattgcttctgcaactcgcatgccacgcgtggtttcaaatctgagaaggagacccgcaagaaggagaataagaccagccgccgatctcaagattcccttggtgaaaaggattctttcgggcgccgttggtatcagtggtatcaatggcgaggtctgcggtcgcgttagtggcaacatctacatttgacttgtttttctctctcttctctgtctattatttttttaaagctttggtgttggggggttgggatctcgatttagatgagtttacggtcttccattacctggatacgatggtctagatgatctacatgagatccgatttttgcttttcttgaatttgggatattttcgactattctatattagagatgagttctaataaagagcatgaattatgaatgtgcattgttgcaaaagctaataaagacggatctagttattatacaataagaaccaagtagaggcgatcaaagaagatcaataatcaattcctcagttcctcaaatcttcaatagaaatctaagattgttgtctattgtatgtcgttgtatgtcgttgttctatggtctgctgatcgaccgaacccctaccccatgtggcttaacccaaacatgtgaatccccacccttcctttgtttctttgttgcttttgattccctttccctattcatcgaacctcgacctatcatctcttttcattccttgaatgacgagaaacatcgtatattgaccctttgtggcagagtcgaaatctgcaagatggaatacaagcccccctccactgcgggggacccgccattaccaggggacaatggtattgagaacaacaataacgatgaggcgcattgtgaactgatcgattctctgaatcgcctgaccctggcgacagagacaccattgcctttatcacctcgtctttctcctgttccatcccatcctctcccctctagatttgttcaagccgctcgagctgtacctgctattcctctgcagcccagtgaacctgttcaagctgtctcgttacaatcgaatcaacctgtgcaatctgtcccacaaacagctggctctgtttctgttcgagacgaacgacacaggtcaattgcatcgctacagaagcaaaggtctgttgcatctcttcgttcggtctcacaaccgctcaaaccttcatctccaactcctggcccttcacgccgcacatcattcacctctgtggggtcgccagccaccgcagcctcagccgcgatgtcccccacacgccttgtcatcagcccggctccagaagctctagttccgactgctttgtctgtcgctgctgcgcatttctcaaaggagcttgaattacaccggtctggtgatgtcaatactaaaactgctgttattattcatgacgactgctatggccatcgctactcccagcttgaggcgccaaaacgaactatcgacagcattgtcgaaagaccagagcgcattcgcgcctgcgctgtgggcatatctgcagcctatgtccgcctcggctctcgatatgcggaagatctcgctgcaaatccaagttcggacttggacgagattgatgtccctttccaaattatcaagactgatcgcaaggtgcatctgtctgatactgccgttacagatgttcatggaactcaatggatgtcagaattgaaatggatgggggaccttgcagaatcacgtctcatcatggatggaaacgaacttgccagacaacggacggaggcagacgacggcctcgggacaagtggtcctgccctgaatgccaacgacctttacttatgctcagagtctgtgaatgccttccaaggagccctagggggcgtctgcgagggagtggatctcgttttcaagtctggtccgatccagcgcgcattcgtctgcattcgacctcccggtcaccattgttcagctaacttcccttccggcttttgctggatcaacaacgttcatgtcggaatttcccacgcagcaacaactcacggtctgacccacgctgcgatccttgacttcgaccttcaccatggcgatgggtctcaggatattgcatatgaccacaactccaaattactcagcaaaacacaaaaagctgacttggccaaaaccgatgccacgaaattcaaagagtatgaagacgctcctccgtacagcaaaacagctatcggctactatagcttgcatgacgtgaactctttcccttgcgagaatggtgagcgtgacaaagtcatgggtgccagcctctgtgtcgaagcacacaatcagtccatctggaatgttcatctcgaagagtgggccgatctcgatgagttctggaaattgtaccgcacaaaatacaatgcattgctcaccaaagcccgctcattcctacggcaacgtacaatggaactcagtcaagagcggcaagtgaatccgaattccccgctgcccaaggcagctatcttcatctctgccgggtttgatgccagcgagtgggaaggcaacggcatgcaacgccacagcgtgaaggtgccgactgaattctatgccaggttcacggcggatgtaatccgcatgtcgcaagaggaaggcctcggtgtggaggggcgcgtcgtcagcgtcctcgagggcggctacagtgaccgcgcgctgtcctccggtgtgctcagccacctgtcaggtttgagtgagaactcagagttcagaagtgagtggtggtctcagagtaatctgagagaattggatgccatcatggctccaacgcccagcaaagggcgcaagaagagtgctgccacctacctgacagccacgaaatcctttgcggcaaaggtcgttgtccctgggagagaccggaggtccaccggggacctcgatgccaacatccctgccgcccctttgccagaagtgagctgggcggtggccaccggggagctctcgaagctcatcatccccgatggccgccagacccggagctgccgcccggcagagctgaaccgccagcgccgagagcagagcgctcaggacaggggtctcgacctcatcatccccgtcgagaaggggcgccagttgcgcgcgcgcaagcccaaggagtcgggccccgtgcccaccaccccacggcgccaggcccgcaagggtctgaagacccccaaaaccgcggccgccgccacgaccctccctgctgcctcccgcgaggcctccccgtctgttggtgcctcccgtcggaagagcaccagtctgacgcgtgcgggaactccgcaccggggtgtcagccccctggatctccccccggttccacaggttccaacttccgtggggggagtcagggggcgcccccgcataattctcaacatgccggcgcaggagcccgctcgtggccgcaagttgtccggcggtgcggttgaccaccaccgccggggtcgaagctcaaagtcccccaagaaggggaagaagaagcgtgggagcaactccggcgagagttcggctgcttccgccggcagttctcccccagtcgcggccaaggatgccgtgatggagggtgcttaggggggatgatctttgtcttgtcttcttttttcaaatttgatacccagactgacttttgtcgaaacttccgtcatttgtgtaaactttgtagaccgtaacagtagatgacggtttcaaattctcgtctccttatgttcttcgacacggcgtacacaaaggaactggcttcgatccgcgtgaaggaagatcccttggatagcccaaatgctgagcgcgatcaacctgcatccaaccgccactagggtaagaaaagaattcgttgaggtacatacataagctactcgtgaagtaggaggcttttcaatatttgtatgctccttcatcgtacaatggtgtatacagcttatcccttgagtaactgataaaatgcacatctttcatcaaatgggcctgtggtttaggggtataatacccgcttcgcactacaacagtgacttgcggggggtcccgggttcaattcccggcgggtccattcttttttgtttttcttttttttttgtctaccttgcttcgtatattattcttttatccttcttggttatgttcggcttgttttcatgacatatatggttagtactgatcctgttatttgaattgtaacagtatacttgtatgttcttggttgatgttgggtgtcgtagtttgtatgcaaaatgtacatctatatatatttacctatgtatgccctaaaacaccacccgcagcctctggtttaactcgaagaatttcgaaaccaccctcgtctctgtcctcacctttctgtggccacaggatttgtcgtgtcaaaatagctcgaaccatcatatagcacacaaaaaagtacatcaacagcaacggtagtatcgccgcacacccaacaatttcaataggcttgcaggagaatgccttgccaatagcaaaagtggcagtgatcaaggcagtattagggaaaataaatgagaaccaggtcattgagaagaccatgcgtccatgtccaatcgccgaccaatgggccgtgcttgcaataatgaagaaaaagatggctaacctggagaagagttagccgagtacacagaaataaccaaacaatcaaacatacccccaaagccaaaggcacgcaaaattagtaacaatctttagcacatcggcggccagcgccccgtcacccataaaatcggccggaaacgacctcttcgccccagccgccatatttaccagcccggcagccgtaaacccgctcggtcccacagaaacaaacataccaggacggagattttcctttggtagcttctgcgtcatcagccggtatatgaaggccgagtacaccatcaatgaaatcaaaaagccaactccctggatagtcgtaccgccaataataaccggcaatgactgcgacggttctagctttgcactgaggatcccagcatgtgggccaatgatgagcatcgggtacgcagggaaaatccagataggagtcatctgcgcgatggtgaatgtctgcgtcgaccaaaggaggagatagatgcccgccgagaacataacggctagagtggcatcgatccagaagagaatacagactgcgtgaatcagccacggacctgtgttttcgggcccgtactgagatacgttgattaggatcgtgccaaaggatactatagctgcgggtacgaagagtgactccgttgggtgcatgaatgacgccttgaatgtatacggataatgatagaaccggaccagcagaagaccccagatgatgagatataaagcgatattgatcaggaaaaccacgatgccaatggtatccaagcccctgaaccgaaatggaactggttcttattagccatactcaaccgaacaggatgatatcgaccatgcacaccttgatacaagacattagctaggccaccagtagccatagtcaacgtaaaatacgcccacgtaatatgacgaatgcgctccttccagctcagctttccagaaaccgtgtgcttgagcccaaacaggctcagtccgttatactctcggcacgcaccggcttccttatccggatttgttttcacggtagcccgcgacgaggctcgctgtaatgcagcctccagagcagacgaatgagcctcgcaaaccctgccaccgggaatttcctcggcagtccccgggattgagagcgcccgctcagcatcttctatcgttggtgttcggtacccgtcttcgccgggacttcgcatgtgccggggtagatcgggttcggtggccatcactgttaactgcgggccgacccagcgagtgcacacggccgaatacaagcgtggatggtttgaacttccccctcgttcgggggttctattgtgctgcttgcggatgatggcatgggtagtagaggtgatgtcgcaaaaggctaagataccagcatggggaaaaaattatgtacgatctcaggtttctgttgtcgaagcccctttaattaatagcgattgaaaatctaagtagaaaagaatactagacgggtcgttgggatcgacgtgaattaatgtggagaccgatggcaagaatccacgactgctttcgatcggcaccatgaggttgctctgagagaggaacagaatagaccacaagctatgtggattctcgggaatatactcgagatggtgaattcaggttgttgcaggtagacaagtctacttcgcgattcgttaacgtgcaatctacgttattccattttttttttttttttttttttttttctcatttctcnnnnnnnnnnnnnnnnnnnnnnnnnnnnnnnnnnnnnnnnnnnnnnnnnnnnnnnnnnnnnnnnnnnnnnnnnnnnnnnnnnnnnnnnnnnnnnnnnnnnnnnnnnnnnnnnnnnnnnnnnnnnnnnnnnnnnnnnnnnnnnnnnnnnnnnnnnnnnnnnnnnnnnnnnnnnnnnnnnnnnnnnnnnnnnnnnnnnnnnnnncgttaacgggcaatctacgttattccttttttttttttttttttttctttctcatatctccaagctatttagtacggagtactataaagacaaaacaggcaatagggcttagggctcggtgctatccccctgaaccgtggaaccgtggagagccgaggcatttgcttgatctccactcgcctacctgatatgtatactagtacatgccgtagccagctgttttactacataccacgttgtataagtgactttcaaatatagtccttgggcttagtctgtcatacttcaactcaaacacgtcaggaatgacagacactcgcagatcggtgctcatcacggggtaagttgcagactttagacagataccaacaacaacttctgatatatgcagtagatgttctccaggtggcatcggcaacgctcttgcgcgcgagtttaatcgaaatggactacgcgtgctagccactgctcgcgaggcggcgactatttctgatctggcagacatcggcattgaaaccttgagtcttacagttgatgacccggagaacgtgaaatcttgtttcacagaggttgagaagagactcggagacaagggtcttgattatctcgttaacaacgcgtgagtacatgtggattttgtcattttatccgtgaacgatgaggtacatctggctaatctcccacagtggtcggagtatgtaaccccactctgcgactgctagagtcaaccatttataggtactgattgctgcagattataccgttcccgcgatggaagtagagcttgccgaggttcgccaaacgttcgagaccaaccttttcgcggtcattgctatgtgccaggctttcctgcccttgctcatcaaggcgaaaggtactattgtacagattggatccattgccggggtacgcttgaggtatatccatatccggagatctgatcgtactgacattgactagatcatcccatatgtattcggctctgtctacaactcctctaaagcagcactacactcgttcagtgacacgcttcgcgtggagctggagccattcgggttagataccacaagccccaagatctatgtcgtgttttctaaccaggatcaacagtgtccacgtcacaacgatcgtaaccggcggtgttcaatcgcgtattgcgcggaccgaccgatctctacggccgaattccttatattcccccatcgagaccgagtatattgcccgtgtgaagcatagccagcacaatgctatgccgaatgacgcctatgctcgcagtgttgtttctcaagtgttgtatggctcagctccatggcgctggttgtggccatgggctcgtggtcgtaaggcctggatctgggaggggcatgctagctggttgatttggatgttgtcgggtggctgggcttggtcgggactgtttggtcgggccatgactaaaatgttcaaactatggaagatcaaaaatgcctcggctaaatgaaggggggaggagagaggtgtagatgtagtcaataagatatagtagacaaacgcaaaagatataacgcatatagatcatacaagtaaataaacacccgtttacatccaagtaccgactttattagccatgttccgttatattcgcgtaccccatgctgagtcaggccaggaacgatcgctggttggccacggcacccgattctagcgtaacacaaggttacctaccccgagtgaaaaagaaagctgttctcccggtcctttaccatctaaacgggctttatatctccgcccttccacattttccctctcataattcatcatgtttaagcttgctcgcggtagacccgttgcggcggctttcaaggctgcaacagtgagttatatctgagatcgggcgctcgtttgatgtgttaattaagctgactttgttgaacaatagcaaccctccattcagagcagaatcgctttgcagaagcgaaacctttccatccacgagtaccgttccgcaagtctcctcaagactgtacgtccacctgcgtttcaccctttggtcgcctaagaaggaacccaggatcactgatcaacaatctagtacggtgtcggtgtccccaggggtgaggtcgccaacactcccgaagaggccgaggctattgccaagtctatcggtaagaataatataccactttcccccgttgaacgcgctcgctgaaaattacaatccaggtggtggtgatcttgttatcaaagcccaggttctcgccggtggccgtggtaagggccaattcgacaatggtctcaagggtggtgtccgtgtgatctactcgtgagtcgaacaaatctaaggacgggttgtcaacaatgaagctgataaatatctttacagtcccaccgaggccaagatgtttgctggtcaaatgatcggtcacaagctcgttaccaagcagactggcgctggcggccgtatctgtaactcggtctacatttgcgagcgcaagttcgcccgccgtgaattctacgttgctgtcctccttgaccgtactactcgtggccccgtcatcgtctcatcctcccagggtggtatggatatcgaagctgtcgccaaggagagccccgatgccatcacaagcacccccattgatatccacgtcggtgtgactgacgagatcgctcgcaccatcgccaccgatcttggtttctccgagcagtgcatcgaggatgcaaagaacactatccagaacctctacaagtgcttcatggaacgcgatgttacccagctcgagatcaaccctctgtctgagacttccgatcaccaggttttggccatggatgccaagcttggattcgacgacaatgccgagttccgtcagaaggaggttttctcgtggcgcgatgtttcccaggaggatgccgatgaggtcaaggccgctgagtacgttgccttacccagttatagcaaaaacaaaacggcgcgaaacaacattgactgactttcatctttttccaggcacggtcttaacttcatcaagctcgatggtgatatcggctgccttggtaagaatcctgttgatacgtcaaaatatcacaacgctaattctcgcttctagtcaacggtgccggtctcgctatggccaccatggatatcatcaagcttaacggcggtacccctgctaacttcctcgatgttggcggtggtgccacccccgctgccattaagagcgccttcgagctgatcaccagtgaccctaaagtgtctgccgtcttcgttaacatcttcggtggtatcgttcgctgcgacgccatcgcccaggggttgatcaacgtcgtgcaggagatgaacattaccacccccatcatcgcccgtttgcaaggtaccaacatggagaaggcccacgagctggtatgatgacagtccccattctcccttttttcgctatggagtcaactaaccacagcccctgctttctagatcaacgagtccggccttaagatcttctccatcgaggacctccagaacgccgctgagaaatccgtccagttctccaaggtcgtcaagatggcccgtgagatcgacgtcggtgttgagttcaccctcggcatctaaagggcgtttaaccttttgtttataatgatagagagggtagggagcattttcatttgcctttttcctgggcctagcgaaccgagccgaaccaccgcagtgacatcttagagtgatctttgtaatgcttttgcgcctgttcctgtgtcatttattttcttgttgtcactgtattcttgagtgtttctatgacttagatcagttcctaatcgggatatgtgagagatgatatattgagctctcattgtttagtgtaaagtatccctttctataaagttcatctatgtagggtagatggctgcttgtccgagtgaggatgacctggactcggccatatattcttcgagcttctttgaaggcttgacagaagctacgtggggaatgataacattctataatgtctccatgatggggcttaaaaaaagaaaaaggctgcgagagcctcccgtactgaagtccacgggtcgcccaccaccttacttcaacctcatctcaaaccgtcccccccttccatcccatcccatccaacaatatccctttgaaagtttctttctttctctcaatctttcgttcgcctcgatctaacatggcctcacccacccattccattctcgagggctttgttgctctccgagacaggtcaagccgccgagaagtgtatgtcccacgtccaaagcccatagtcggatctgactgctgataaaaataggctcaatgcgattcttgataccctagattcatatgaaatacgagaggtgaaaagtcgactcgagccggtgacattccaacttgatttgctaggtaagctgcctattgaactggtggctatgttggtagagtacttggacctagcagatcttgttatccttcaaagagtatgtcagcatctgttcggatattcgtgaccaacatgttgacatttcaaaggtctccaaacgatggcgtgaattgctctcttcaaccatcgtcttcaccactgcagtcagacaccacatgggagaaaacatcatcaagtccggttctacccctatcggttttggcgcgctggtaaaaaaaagaattcgcgcggaaaggggaattcctgctgttgtggccacaattcctaataacttgtgttgcaatgtagcgaacatcatggagagagaggccctaagctgttttaatggagtatgcgcgtggattgaaaaatccacagatcaaactactatattcatggtgaacctatcaaccggcaagaacagaatcctcacaacagcgaatcgagagagatttatttatgtccaggtctcggacaccttagtctcagcaatttctgttcgggggtatgtagccagaacaggaatttcactttgctgaatgcacctctgactggacacgataggtattgtcatgtctggaacatatccgaagaacagtacaagtcatttcgcattccttcgctgaaatttggtcattacatctccatcggatccaaggtcatgctgggctactcggattccgtggtccacttctgttttgactctggaatcgcccgttccatcaaaatcgggccgttcgttcttttgttgtcagtacatccggaggaagacggattctccgttgtttgcgtccgcagaaaaaatggcgacaatactcaagcatgggcagatggccacttgtattgggaagagcatcatttgcagactcagaagttctctgtccatgataataggtttatctgcacgtgggagcaatatcgagagcttcctttcagacaagacgaactgtggatgtttcgatgcaaaccagaagatagctggccaccatggagagtgtgcccgcgccctggtcaaagctctactttgctggattacgatatgaccgaagcctttatggatcgttctcctaattatctagaacacgaggatgaatatggctcgctttcgctttcactcgaggcggatgatcggattactgtgcatttccgctgcgaaaatattcaagagctggaattcaattattcttacactaatctagactatgcagcccggggcccggggttgatttattgtttagacatgatgttaggggatttgaaaattggctgtgaatttccagagctgtggcatgcccgcgatgctgaagcgtattcatccttatcctttcgcagaataccttttgcagctaaccaggcacccaccgcgatttggggggatggagactttgctctattccttgtggatgacaaaatctggatctggtgttttgatgaggcatggatcccttctggcatccctaacatgaagattgaatttcgcgatttgactacgcgtacaagaaacaagaaatgactataccaactagtcagctataacccctgtcaaatccacctgggcgctagcggatgattgcagtcaatacaagctctttgttaagcaatactgtatgaataaatatgtagataccccgatgatgattagaccagggccttatatgcatgtgagtttaaaaaaggcagattgtatcacagaaaagtgtatcattattagggggtaatttgagatataataatagtacaatagtacggagcactatggaggtagaactacggagtatgtctagccagtttagctgtagtcaggcatgaaccctttatcatcaccgaatcccagttaaatgcctcaaagcctctttatcctttgatatactccgtatagcgtgttatattagtgagaattaggtagaatccaggccaatagggctataaaagatatggagtagaggttagacaattaaagtaatagccctgtcacccctttttcccagataatatgctaatatatccaattggactctttcttttccttcatccctgtttaaactcataacttcctcattttttctgcagaccggactgtcaacgcatttccggcccccttccccgcagagccttttcctcaaccttccagacaacttcgagactttcttttttttttccctcaatattttttgttgaaaacaacccaatttctgcgcgatgacagaagtgttgattattggttgatctcccacgttcgttcggcacgagcataaacggtccatcgcgtccgaattccacccctcacgatcccgtcgcatccaccatcgatcttgtgctatatatacccacacccctccgacatgagtcgtcttgccgaccccccttctactaggatttcatttgccggggtatcagacgcccccggcaggacacgaaacatacctgtactttcgtcgtctggtcagcattcgatggatatcacccctccgcccacgggcgcgcatggctctgacgaccgaatgaccggaatcaccaatggcgctgaagctggaaacaatcttttgactgctccaaatgcggctatcggcgctgcggccgcagctcagcagccaaaagtcgtccagactgctttcattcacaagctctacaagtatgccttttggtcttcctgagtcttttgtcttcatcggcttacctttttgggaaacagtatgctagaagaccccagcatccagcatctcatctcttggtccggtacaaatgatagcttcgtcatgtcgccaacgtcggaattctccaaagtcttagcgtgcgtgctatcctctctgccaatgaactcgtctctgaccctcgcagatcatacttcaagcataccaatatctcctcgttcgttcggcagctgaatatgtatgggtttcacaaaggtgggtgtttcgcatgcgagctttgactgggcgatttctgaccatttttgactctgctagtgagcgacgtctttcacaccgggtccccggattctgcgctctgggaatttaaacatggcaatgggaacttcaaaagaggcgatctagctggtctacgagagatcaagcgccgtgcttcgagacacgctttgatccaccgtgattcattccctggccacaaggctcctgtttcgcagcccggaactcccgccgaacccgtacatgatgcgaccgaagctagatttctaaatatcgagcaaaccttctacgatctgcgtaatcgtatggctcgggccgaagaaggcaatatcacactgaactcgagatgtcatgctatgaccgaaagcctgacaaagtgctaccaggtatgtccgccgtctatgttattgcagggtctagtgctaacctgattttagtggacacattctatttcacggtttcttcaagctgttgtgcccgatagggaaagccctctacatcgcgatggtatgtcaatattgccgcttccctcatggtgacacccactgacactcgccagtctcgagcatgcaaagagaagttgagaaacatatcgaaatcatgcgcgccatggaaaccccccacgagaccctcatgcctccgcggcaacagtacttcgccaacatgactgaagccggtccacctttgtccccgcgccaaatgccccaggacgatgcccgtcgacagtccatgatggaccatacacctagacacaccaacatgatccgaccgcccgtccctccccatctctcagtatccccccgccgctacggctcgattggcggcgccaattctgcctcagcatacgctcgcctacaacctcctgttgcgccgcccgcacagcaaccgatgcctcatcctctctccgtatcaacgtccccaggaccaaacttgacccgccgtcacacgtctgcggatatccgacagcacggctggtccccctcggctggctcaccctacccccctggcaaccccccaaacggcccttggccttcatcaccagggcaccgaaccccggtctctagtgaccagcaagtccgtgatgtcctcgcccaatacgaaatgggcgccccccgccgccttcgagaacaatcccgccatgccactccaccaactgccgaaccttcaccgtccatgctcggtgtcgataacggctggacacttggtggttcaagattccctcacggctcttccttgcccgcaacccgtcgctcgagcatggcgagcaatgtgcattcattgctcaatcctgcagatactgccgaaagacccgacgaggaccagcaggcgatgtcagaggaccgtaagcggaagcggttggaatgaatcctacgtttttggaagattcccagcatccaccattcactaatgctggcactaccttcttctccaatcaagtccccataccaccgacaagccatgccactcccctcttcttcccctgctcttttgatctgcatatgtactattcaccagagcaaaagggcacccatttccaggcatctggagaatgtccccagctctgacctcatttttttaattccgcctgtagatgtcccatttcccccatttcttctccacctttcatcttttctatttttggatatttaattctggcgaaggcacgccaatcccggcccttggcctaacggcctacggctctccgggtctccatacttcgttcacacacagcatatcatatatacccttgggttgggcggagcaaaaaaaacatttgaatcttgtggcacctagagcaagagactggaattgaattgtattttatatttgcagtttgattatatcaattagaatgatgttttttttctgcactgtttgatcttgctattttgttggagtggcacgtggcacagcatggcacagcatggcactcagccgagtatgtatgcagtcttccttggtcgtgtctagccaagggacactgcgctgtagtctctgccgctggcagagtgaggcctcagcgggcgatccggctgtggcggcatgggttcaaccccaagcccctgaatcaacggcccaatcgccgtgtctggcgcatccgaagcgacgaagatcaaagcctaatccatcaaagaggacccagagccaggtacggagtagagctcgcgcaaagctcgtgtgcgtggtaacatagaatcgaaccgatcaaccgcaaatcttcatctcttcttcctcttcttcgcacgctcagccaaaagctcatcaagataactcgtagccttcttcctccccttcgagcgcgcaggagcaggcacaacctcaccctcaccctcctcgccacctttatctctggcctcagcagccgcagccgcaggatgcacaccacgacctgctccagccccacctttcctcttattcttctgcctagcaagcatagccgagcgaccgtcctcttcatcatactcgtcctcgacgtcggctttcgacacactagccgaagcagacgcagccgcggccgtagaagcagcattcgccgccttctgctcggcagcggccttcataacgcgatcgtagttcttgccgaggagttgtttacgtagtttatcgtttgagtccagctctgtgcgattccagcttccgtctgctgctttttgtgggaggggggctccgacaccgaggctgtgagttcgttgtggttagttcgtgcattgtagggtatatttggtggaattggagaatggtggtaaggtatatgcctagattgtaggtggagaggtggaggagcactcacgtctctggcactgcagtgaagatttcatcttcttctcgttggagctcttcgtcggtcttggggtttgctagctcttctggtgtctgttgcggtagccatgaggctacgagccgttgactgcgcgatagagcaatattggcccggttaaggatcacatcagactcgcttttagagagcgacatattggtttctttgcgctcaatgtcgggttattggcggattcgaatcggtcttttgtggttgggatctgcgatgcctttttttctgccgatatagcggtggcggtgagcatgatctatagactgacctgcatatgtaagtaactatacgtaccggattctccctggcgtgtggagctttcctatttgatctgccgccactttcatgagggtgctcagactcaggctcactgagtagatgtcaccacggactcagatcagtgatcatgcttagttcagtcacgtgtagaatgactgttgcagcctaccgcagactatacccagaagggattagcccccacagggtcgtttatactgtgatagttagttcgttgatagcattgctactgccctcaatttgtgaaatgctaccgacacgcgaaaatcgctaccgtcacgttgcccgccatactactttaggtaagtctgccatctctttatcttccgcttaagtcggcttctcgggagaaacgacatgacttcggggagcatgccactgagtctcagggagaaagaagaaaactgataacattccaacgacggtaaatggcagatgaatgatgaacaaatatctccagccaaggctctcggctattacgccacccaggatcgagactagagatataatgcaggtccatgtcatcactaacagaccagtccggagagatcgctggtgaacgaaacaccttttattctcccagtcagcgttgtaagacgtaggcaggaggttaaattgacacacatatctcccatgactgcaacagtaaaactcccaaagaccgcggagctaaacccttggataattcgccctgctaatataacattgtagttatcgctggttgtgcaacatacaagggttccaatgaatcccatgatggtagcgaagataaattgtggccgtttgccgtatttatgtgccagagcagatccaattggtctaatcatatattagctcaacgcccgtatcaagacatatatgagacatacccgtaacaagcacacgcaagcaattgatatgcggtaagcattgtgatatcttcaatagatcgctgcacagcgtgcgacatcaagaccatagatggagcaatcaggggcggcggaatggaagagaaaataatcgaattggcgaataagacacaatatatcaaattcttcctccatcgtggctaattctatgcggggtttgagattcctcgctccattacatcacagggtaccacctaccagaggatcgtttgggctgttggagggctggggaattaagacaacgcttgcatgctactcttaggatattttcttcgttttgccggttatcccttctgtaattacctttccagtgccaaactttgtctgggaggagacatgtgtggatgattcatcgaatagtagaaacgttccaggtgcatggcgctcattcagttgaatgatacccaaagccattttgtatgatatccgatagagaggctcaagttatatttgatgtaaaggtttgattcacagattagaagattagaacctttttttcgcccctgcctctctcaggggacgctcttttatatcctcacgcccccatcaaagttttcctggggaaactatggcggggaacttcggcgtctgcccagatattgagcttgaatttatctcatattactagtaccaaaacagatcatgaaccactgtcagtcaaagtcggatctatacaccacataaggttaatgccaagcacacgaggaaatagtcgagacccactatataacttcacctcccgcgaagccctggactttcctattcaggtagtgcgaataacctggggattgtgacttgttgtcaccattgtgccggagataggcatacctcgcagatattcaaggtgttaccttgggacaaaacaacaaccggtgccctccagggctgcctacctaggtacccgtggacgaatggagacctcactaaccgggatggaccctgtaggagtagatcagcgccggagtgttgtgaagggatattgatcaagttgactccggtccggttggttgataaaagttgggtgttgcatccaaaacatttgtgggcttaacaggttggagctggagaaatttggaaggttatccatggatgttattgttccacgattaacacctgttaacacccaagacattaggcaataatccgtaatacttctttatcacctccacgcccttcttttctctctgctaagcacttgaatttaacaacccgcttgtttatcaacttcaccagagcgttttcatttcttctgaatcttgaagctactcaacctttcgtctcctttcccttgtcgaaatgtctcgctctaggggcttcgtcgtaacgatcccctcgataaacttcgatcacctgggcggcactgaaatcaaactcgaccagccttccctctcgccccctcgtacgttcgttattggcgagaaaatatccgaagattaccaaacgatgacccaggaggaatatgagcgacaaccggggcctccgtttgccgtcattaagttctcttgtcacagccttctagaccctactcagcagggcttcatgcggatctatatgcagatccctcttgatggtaccctttctagcgttccagaagtccgagcccagcaggctgtaagccagtgcacccacacggagcttaaagcgcttgtatctcttgatcgcgaaaactgcatggcagtaccgaaattgcttggctatggggaagggttgcaaggtgtcgaagaatttgtacctggtggttacatcaactacgttgcgtgggaacgggtgcctggtgagcccgttgactactatactttctggaaacgcgactttgaataccgccagtgactacgttccgcctttcgtactgcctatgagtaagatcataacccctacatgtccaaaacttcgagaactatctatactaatacaacgaagagaactcagtaggtgttcttggcaacctggacttacccctccgagcaagattatctacgatgatgtgaccaaggttatgtaggtagttccgacattctattcaactaaccaatctatgaatgccgatggtgatgagttaatcacttttaggcacatttccggattccgaggagcctatccaatggacactgagccgttctaagacgagacctacgtgttatggggattggaaaagccatctgacaggctggattggtatactgatagctcggactggacctggtgaccaatgtggatctccgtacatcgcttctttgacagtcgaatggcctttcgcatatgggattgtattcttgagttgttcatgatacccagctaccctagtatgcatgtatctgtcgctgaactagtgctttcaataagacaattgtagtgcctttccgctaaagatagcccttgatactatgggagacttacaacaccttagaatcattcagcataaatgatcagatgaaatttccgaagctactctttgacactctttgacaacgtaatatcgtcgtcctgtaactcgcaagttgcaagtttccctcagaaatccaatctgatatcagtattcaacatgggtccttcatgcataatgccccgacaaagctgtagcctcgatgctatcagcttcattaggaataaaatctcggctttagtttaatcatcagctttggcttgttccatagcacataacattcttgatccacccagtccttttcaggctggtccaattccatatcgaagttgaagaccatgcgagcaagaatgatacgcatttcgacatatgccagactagacatatatatgagcaaaaagcgaatacagtagagacactaaaaacttacttgcgtccaatgcagttcctaggaccgaaactgaacggttgcattgcaattttactgtcattcgagaaacgagggtcgtccaaatgccgctctgggataaactgctctgcatcggcaaagttggcaggggagtgactggcagcgagatgggagacggaaacaacggtctataaaaggcgtaagaggtgctgtatgctgtatggctttttaagcaagctttgtacttaccccgcctggaacccagttcccagcaatcatatcaccctgggcatcaacaatacgaggtaatccaactgcaacgggtggatacactcgaagagtctcagtgaggacggccacacaatactctagtttattgcaggattccaaggtgatgtcttcttcttttgcaaatgttgatctgatctcatcttgaagctttgccagaacgcgtggatttctcagcagcagatacgtcaccccagagagcacagttgcagtggtctcggagccggcgatgatcaacgtactgccattggtgatcatttctgggatgctgaatcctttctcggtatttcgatacctcaaaatgttgccaaagaaatcaggtctctcattagacttggctatgcgactctggactttttcctcggtcaaggctaggtgtgtattcctctgcgagaggacatacttaggagtgatgtatgggaggatgtatttcgatcccgggaagcgtcgagacacatttgcgtaggcaccatacttgagcgaactgaagataatggatacccattggtggtaatccgaattcttgagacagtcgaaaggctcaccgaaagccaggtctccaataatatcaaaggttgtgaagttataccaggccaccatgtccacggtatttgtgccactatcgatattctcatgcaagcgctgcatcaaaagatcaacatagcctttaattataggttcctggccgcgcagtgagctatcggagaatgcgtgcgacaatagacgtcgaaagcgggaatggtcggcgtcattggagatgatgatactgggagcttctccagcggttggtgcatagaatcgatcatctttagacttctgaccatggccaacacgtgtgccatagattgacttccaggccgcgccgtctatgaaagaaagttcatcgggggcaatgcgaactacatcgccgtactgttgatgcaatgctttcatcttttgtgggaaccggccacctaggatcatgcgaatataaggcagacgtgtagctgccatagatttaggtccaggatatttggacaaagggtggaagtagacattataggccaggagaccgatgaggtaaagtgggatctatttagaagtaagcccttagttagccgaattccatcgaaacaacctgaaagaccagcgtatacttaccaacgtcaggcttagcttcagcaaagcgggagctatatttgagaagtcttgcatgtttaaaagtgccgaaagaccaggaataaccgctatgattagggctgtcaagcataagattcgagaatattcacaacatccacgacatttcgagagtacttatactcctcctttcctccttgccactctcacatgtgtgacataaaaacttaatgcacaaaatctctgcattatgatgatctatgaactgagaccccgcactctgcatagcacgattctagcccaacaagaggcctgggaatatgtacatggcccagcttggtttcaatctaaatagatattaggagagacttgttgtcctttgaatccgagaatctcttcccacccatcccttataaataaattaggactgggtattcacctagatgctttcaacacacagtccagacattttgaataaggatcgaatgttgaagtctcatataatagacacaccgtcattggagaagctagtgttccaagctaatgtagccaagctcatgaaaaccttccctgggttggtcgcggcccatgaataaatcttgatgtaatgcccatacaaagggtacaaaatccgtgacatccatttcactcagcccataaataagactaatatgtaatttaagcacagttaggtcgttctatcactaatgtattctaagcaaccttgaaattagtatcgaagtgcgagaggcaccttaaaaataccatatatagagattgcatagcacctcaaagtagtatgcttaatacttatcaatattgataccaaaatacacaaagtctatttgcatatgtatacaagagctatattttttatgaatctcttatcctttgtatgagcatgacataaaagatttatgcttgtactagcaatccatgtatgtatcttttttatgccgagagtaaatataattctgcgcaggaaatgcagcataaaggccgtgtttactgggcaatccgaagagccacagactacgatatccacattgaacaataggctatgttaatcggagaccttctcaaatggccaaatttactctgagaaagctgggctaaccagagaccaaaagtcttgttactatcatgataattacaaatatgtgtgtatgcgttgtagtacatgtcgtcgctatgtgtgccctctgcatccatgtggcaatccatacattttcagtgggagacaatcatttgcacggaggacatcttgcagcatttctaaatcggtttgaggaaacatttgcgagccccaagaaatgaattatattcctctgtggagtcgaagcttgtccttccctggtgaggaagcatcttaaaaaggcagtgagaaaggcctgcaggaattccaaggttagcttatgaattgaatactcgaaataatataatggcctcattcaagactctgtgtgttttgaatcaagtccttagaatcttcattttctgtgcttttagttggattttgactcacgaatccaagataatgccatcctcctgtttcagctgaccatggtttcatatcaggtaataactgactgtcattaagtatgatgtgggtgaattgctctaagctggggggtccatttaacaaaattctcagtaaagcctgttcacagcaatacatgatatttccattaggagaaggaggagtgtacaggcgcagaacgcaaaaagtagtatgatccgagtctttcatgagctacttgtcgtgatgacattttactgaacacagagcccgacaagacactctggtagaagcatcaatcgcattctccaagataattcgaggaacctgtgcggtattaccggcgtcacactctccatcaataatgaatgctgcaggtattgctgttaatgataccgaaatttgcttggtgaaacgtctcacgggcaattcaagtttttccctttcgaattatcaaaatactaatgatcctcagggtcatataaggattacactaattatatcaatgtctatactacaatagtctgaataatctcttcaacaaggtataaaaacgttatggcatcatttatgtacagtctatctctatacctgatactgtgtctgatctagacacagatccccattttgttccaatgtagtatgacacggggtataaaaaaccgagaagcaaccaaaatcagccgcaagggctcacactgtagctagaccctcatgttgacgtttcacccgcaaccttttctcggttttcatgaactcccgaataccaacagggatattggaaaacaggtcatcgtgttcagacggcagtgtccagtttgtttcgctgccaccgccatcatcatccatgcttccactggctgcgcggacttccgcccgaggtgcccagcgcatgtcccgtgttcctttctcaggcccacctttagctttagccattgtgatcctggatgcccagtcttccatctcatcccggaagtcatcccagacacagtgaacgcagccactcatgcagcagttgtccggttcctcgggttggggaggaatggggactccgtttatagttttccacattgactctggaggagcttcaccaggattgtagcgcgaggttcggcctggaccggtgagagggctgccaaaaacgatcgccattctttcttggggcgattgcggtgcgacagtagatgccggcgtcggtttggcctcgggccgagtgggtgtcgggcgtgatgtcggtgcaccaccagcgtatggcgagttcgatttcaatatcaatgaatagtatcctgacagagggtaggcctgaagaggctctgcagtttcctctagggaagctggggtattgggttggtcggattggctgtgtccgttcatgcgccggggagtcggaaccagcacatattgtcgatatgaagcgaatgaaggatccgttccaacagggaaagagcggatttgagacacggagctccgcagccagtgtcttgtacccgtcaagagacactccatagtgtgagttggagaaagacaagaatgttcgtgcattgacgaagggaaattaggtcataatgcaaacactgcaaacaattcacgattgtttatctttctgaggtcatcatctgggccagacgaacaccccacgcagcaatggattccttagcaaaaaagcgaaaaaccaacgagactacaggcattcctgtagcgccagagattcctcaaaatgaagcccatcggtcgagacggccctccttccagtctccaacgagggccagtcttgcacgatcacatcccgatttattagagcgcgcaattagcagatctcctgtccgacgaccagcaagcagagacagtgggcaacaagatcctcgaaaatttggattacgcgatcgcaaagcactccgaccttcgctcaatgcctccgcaagtcccctcactcgacctcgaggctctgaagcgcccgaaagttcccccagcaggcgctcaagtggcgttcaagcgttctcaaaacccccgcgcaggatttcaaggaggattttcccaggagatttagtatttggatccccaatgccacagccaaagaatcccgaatcaaatacccccgagcgtcaattggcattggaattgggtagcgccacaagagaagcatatatggatatggatccggactccggtttcatggatgaagatatcctcgaacccgatcttccccccacgcccacacaattaggtctagaaaaggccccagatcgacccaggggaatgttgagtagcagccccagtaggcgacaggagaaacgagcgaaacgaagaactatcaatgctttgtacgaaagcccacttaaggcagtgaacttccaatcccctccgctggaggacctggagacagcttcagacttgggtgaagtttcagcagctgttcgcgagaaacgcaattcgcgcgagaagagcgctgcagatctgcgacggctgagaagcgaagttgaaaaactggaacaatgggcacacaaaatcgagtctaatcctgactcggacggcgacacgagaggactcgacgaatttctgtaggttccacaagcaaactcggcttggatactgctgacaatctctaggtctttactcacatccgaagaggcgaatcgtacaagtctcccagtaccaaaaacagcccctaaatcggtatcatccctcctcgccactctactcccgttctccgccaatatccctcgcccaaaacggaaattatcatcgctgccgacgaatccatttgccctgcaagaagcctctcaatcactgccatacctaacagccttcgcgcccttgaccctcaaaacccgtacaactcggtcatcacgtagggaggagctgttcgaaacacacacactgaccttttctcctccatctccgttcccagcaagtctatatcatgtgactgttgtctatgagacgaacctcgagacccagtctttgatttctctgtcagtgcctgctggcagtgacagcaagaaaagaaaagtccccgaagctctccgtcgatggatcaatactcgcttagagaaccctcttttgaaacttgacgtggcaactctatgctggggaataaaccgttactgggaatctgcaattactcgcgctcgtttgtgggcacacattgaccatgagtatggccctcgggtctctcagggtagaaaggatactgcctcggaaagcaagaacggcctcatcagactttctgaactgcgacgactggtcccgcatttagatcggagcgcgatggtcatcagccctaaatcccctgactccagtctccgagtgcttttgtcaaatactttggtgttggatgaatggaccggagagcctcagctgcggcctgagattagcgtgtcgatccccggggtagataagaagatcgatcaggaggccaagaagcttttccatgcgttgctacgtgaggatggcgctttggtcacgcgaggtatcgagggtggtatacatgttgatgcggtggtaagggcgactgaaggtgctcttggtgctttgttcggtggtctttgatttttttttggtattccggtgcgattgtcagcgtcaggtgttggagtgatctcaagatacccgagcagagctcacgtgttcctctaaagtatgagataatgaattttctgtcttataaacgagctgaattagctatgtaatcagtcactgattgtattgcggcacgttcatagatgcagtaattgattgacatgctataattcccatccgaataggcatctaggaaacttaaatcgatatcgaagctacaaagtatatagtgaaatcaactacaagggttcaatgttcttctcgccggaagctcaagatacaacgcctagacaaccacaaaattatgagatgtacaggcacaaagccgagattgagagaattgggcagttttgaatttcgagagatcttccgagttctttcttttagagacaaaaaggagtaaaagttggggagggagagagggaatcaaggaagaggcgtaacgccatgccacagtacactaatccccgattcgaaaaccgacccgatcatcatcatcagcacgaggagggaattaacacatttatttcttggcattggcctcatcatcagccttggtcttggcacgcttctcgcgcatacccttgtagcgggcctcagcgcgggcgtcacggagacgacggtaggcagcctcctcgcccttggggagggagtcgcgcttgacctcggtaacggcctcagcagcggtggggttggtgatggggaaggtggcctcaacacgggtggcgatgccgtcacgcttgccctcagcgacggtggccttgacggccttgacgtcctcagcggaggagtcaagcttcttgaactgaccgctcttgcgggggaagaggatcaggcgagccttgtagtcctggagacgggcgacattggcaaccagagactccttagagtagttggtgcggcggtggtcaacggagataccgacggtgggagcaagcttcttggggataccagcttcctataaagcgcaaaaagaaacatgagtcagcaagttgtttctccgtaacacctccactttcgacgcggctcattttaccttcagctcagcgagggtgaaaccacgaccggcacggacacggcggttgtacttgatggtggggcatcggacaacgggacgcagcttgtcgaccggacggggagcaacagcagccgccttagcgatgcgggcctcacgacgacggtgcttccggccgggctgtgcgattcatgttagtcggccaaattcatatcctgcaaagagaaaaatttcctcgattccaagtcgcttgcgatatcgttcggaataagagaattctctggtcggggggagggatgttggatagtcgtacctggtcgaagtgcacacggacacgacgctgccagtccttgtggaagtctattcaagaattcgttaatcactgttccttcaacgtctggtctccccaagcctctctgtccgtttgaagcgacacatagagttgcaaaagcgacgggtcactcacggttcttctgaatctggttgttgtgcttgatcgcctatatatcccacacacaatcggtcagtcaaccatttctttcgttcttttcgaggcgtatttcaatccatcgatttctctcaatcgcacaagtcgaatccttcattgtatctctcaagcagggatagggaacgcaccatggtgacggatggggatcgagccgggtggtggtcgtcgagggttgctggtcaaatcctcttcacggcagaaaatgaagttcccatttttcgtgtggccgcccgctgactggcacaccgcctcgcttagcgagccctaaccaagccgaattcggtaatctgccagagctattttttattttttatttttcatttctatgcttgtctgcgacgatatcaagcatggaattattcaatgagatcatgcttgaacttcagtatattgtttcaatgttgtaattcgattttggtctctgaagactctatacctattgtacaatggttgtaccgtcccaaattcatatccccaaattcccgtctatagctaccctaagccataattcccataccgaaaagacaattgaataacgccacatgtgaagggccatggatcactgtcgcatggccacccaaattcccccccccccccccaaaaaaaaaaaaaaaaaaacagttcgctacttggaaacaccatatttggcatgtcttcatcattcgtgaggttcccataatcgtaacaagcaaagcaacgctaggtcatgaatcatatcaaagtcagtggcacgagttcttcaagtagccacgggatatggactcaagcattgatgcccaggccaataccattcgtagtcctggacttcttcgtggcagcaacgttcgcgtcactgcctgccttgcgcttgccagcacgagatcgatccacaccaggtttctgtacctgtccaaacaactttgtctggagcagtgtgctgctcttggggacagtggagcgcatgtgctgcggggaggtccgagcttcctctgcagcctcggaggctgaaagggatacggtgctgtcgctatcatagtgatcctctcttgggtgcccagctggagtgatgtactggttcttcgagtggttcggggtgacggggacagaggttgcagagtgactaccataagcgtgcgtctggttggtgagtttatcggcatagagaagagcggcgagaccatctgcgtgttcaccatgacagagattgtgtatatcattctgagtgcccggtgacatgctgccgtagttgaagatctgagaaaagtgcttgcgattgtcaccaatgcggcgcttcagcataaggttctgctcctcgaggtctatagaccgactggtagcttcatcaatggcacgcttcgcttttcgaagtcttcggtctagaacggtattgagttcttctaattcctgcgagcgttgaacagccgaaagataatcaaagtttaaggcagactgggactggttgggcgtaatgggatctgcagggtgcgagcgactgcggtactcggcgctctgaataatttcgacttcgcgcttggcgagctgatgctccacctcggcacgcttgacagcttcattgcttgcgaaagagaccaagctgttctgcagtttgaagtgcagcgcagacatgcgcgactctcgggctacggttaaaagttccttggcaatagtgcgcagttgtgtttcgctggcgttgtcgatatcctccatggtgggcaggttctcagaggccccgtaggcatcgcacaacgacttatccagatcagtgggcttcaccaacaaagggctcaaggagcgcgagtgtgagcgagaacgaagcggggcccctgggatctgagatgagggtggaggggtcatatcggatgacgacaatggtggaggtgagaggaacttcttatccgactgggacgatgggcgcttagccatgacgctgagctccggcgatggggacaaagtggcccggtgggctggagtcgagggcacgatctccgcaggtgcacccagggaactttgggagttgaagttttgagacatgatggacgtgtggttataagtgagctgacacaatagtatatcacttcgataagaccacgagggtttagccgtggggagacgggtcctcacactaatttcttatcagcctctttatcgtagaacagatcatggacgaacaaaggaattatctacataccgaagacagataactatcagtcaggacttgggttcggtcgatcacacagatgctcagaccaggtatgttgtctcaggaaccaacagaagatgggggatctgggggtggagcaaggggaatttcaatttcgagctaagacgacaatgactcagagaacttgaagaagaatgaaagaagggagaataatggagttgagtgagaccttaagaggaagaggttaactccagcgttattgggaggggctgggaggctgggaacgggagagtctcaaggtacccgctttgggttagtccatctcccagccccgatcaattatctaagaatataggccaatcagaggtgagtatacagttcggccaagcctatttaggttagattggcgatcacgggacgctcagggcaagtaaacacccgcgaccgggcaagcgctgggggttgggtaggcaaccgataagcatcaagatctgtacggagtatatgtatatatgatatcatggagatgttttgatcttgatgctttgtctatcggaggcttgagatgttctgggagaaatttcgggttcttgcataacattagaagataaaacaacccaagtattacaactcttcgaaccgatgaaacttgagattgcatataacaatcaattacaccgtagctagttagaagaaagcaccatgttatgtcagagaaatcagacaagaagacgcaagggcatctcttagcagttggtaccagctcttcggtggcaaaagtaagggtctggtctttgtaatctctactaatatctgctaccaaatgaatattgagtatcggaagagcattatgcccaaaatataattgtttaagcatgaagttgcgctggagaactatttgtttgtaggtgacagctctttgatatatatccgacaccataggccacgggtcaaataaccgccaaattacaatgaatccatggtattccatacttgaagaatagatctggatatgattgtagcaatgcatgacttagaatgatgcatatttgttttatatctgcttagtaccaaatatttcatggatcgggactaaatcggtcgatgcctgaggcgacgatcgcgggattgtgagaccttagaaatgtaaacaatccgcttcgtccgaaaggtttctaaacctctagttctttattcctttgcgtccaagacaacgattttgataggactgaaactgctactgcgacttttccccaccctccacattctttctcccgcttcttatcgtcgggcacgagcgtccgaatttctaaacgtgcgactctctccctgaccaaggaccatcatcaatagctagaacgccaatatggaaggacagtctaaagcatcaacacgccctgcgagtggtataccacgtcctgcaagtggtattccacgacttacttcaagattgcctttacccacgacaactgcatcaaaatcgatcaaaccgtcaccttcccgagacagactacgagcggatcccggcctggacgaaaaaagattgcgaagaccatcttacaatacactcgtgaaaaaaccgtcctcgcaccatttgtcacctcccaagccgcaggtcgatccaaccccggccctcaagcaagaccatacccaaggcggggaagacgatgcacatgttccagaggagacaagctcgattgctggggatgatgacattgtttcaatcgaatcggcccaagaaacacgcggtcgccgtggagtacgcccatcgttgtccgagcgtacacttgaaacgctagcgcaaattccaccatcaccagcttctgtgggaaggcagtctagctttttcaatggtagtagcccggtacgatctcgatctcgtgccccgtccaatgtgtccaatgtctcgagatcgccatcgggggcctcattttgcgcgccgcccagcaacgagctatatatacagcctgtttcgaagctgcgttttccctcgaaggctcctgcgtcgactgctggatctctttctccagtccgcggcttggaggacagtgtgagcccctcaagattgaagcgcccgtcacccagacaaggtattgcaccgggagacagtatccagacggacgtcagttcaccgcttaagagggaaagaccgattgggaacagggatgcaccaaaaccctcgcttgtccgtccatcatccagcaaatcctccacaaagcctgctaagtcagacatgggtcctccagaaagacccctgcaagtgaagaaaacgagaaaaccaaaaacagagcaggtgtcgaccttacgctcttcctcgacggcttccagatatgtgtctgcttcttccaacatgcctgatgacttgtctccagagcaagaggcagaacttgaagctagaaaagtctctaaatcgtccagtacgctgcgtgaaactatagcaaaggcaaaggcagctcgcaaagcgatggcggcaggagaaaaaaaggaaagcccaaaaaagccagtctatcaggctccgcctatcgatgcgcctatcgattcctgggtgggcggcgacgatgatgatcctttcagccaactgcccaaggggtctaactctttggtgatccgaaagcgcgtacagacagcgcgcgcgaccggccagttgaacatcgcggcgttttgtttaaaagagattccaaatgaagtgctgacgatgtacgactacgacccagataactctgcgaactggttcgaaaatgttgatcttgtcaaatttaatgccgcggacaatgagctggaacagatctcagatgccaccttccctgatatcaaccccgaggagtttgatcccgatagcgatgatcgaggacttcaatttgggggcctcgaagcattggacctccatggcaatatactcaaatcactcccgattggtctccgacgtctgcaaaacttacgcactctcaacctgtcaaataattctttgaccatggccaatatcgagacaatcgcagagataaagtctctgacagatttaaaacttgcgaacaatgaattgcaaggggaactaagtgcggtcattggtcgtcttcctaacttggagtttttggatctgcgtggcaatactctcactaagctcccaaaagagcttgttgggttgagttctctgagaacattggacgtcagcgagaacaaattcacttccttgccgttcgaggtcctcagcaaacttcccctgagaacgatcaatgcgcagaagaacaggctggaaggcactttgataccggcatcagtgaacaagttagagaaattgcagtccctaaacatcgccaataatgctgtggtggtcttctcagccaacgacacacttgaacttcctaatttacatactctcctggtcggtgtcaatcgcatcacgcgtcttccatgtatgacttcctggcagtcactattaacgctgtcagccgaagaaaacaaaattacagagcttccgcaagggtttgaggagctcaagagcctcaagaaggccgatttcacaggaaatgccctcacgcgcttggatgagaaaattggattgatgcaaaacctttcctctttgcgggtttccaataacccacttcgtgagcgcaggctgctgagaatggacaccgacgatatcaaacgagacttgcggagccgctgtgagcctgatcctcaggacacagatgatgagggctcagtggccacgcaattcactctagcgcccgagaatcccgtgctcgatggcagctggcagattaaatctggtggaactcttgacaagtcttatgctgaaataaccgaccttacggtggaacaactggagatgcttccgtcgctagacattcgatgcctctatctacagcacaatgagctgagctgtttcccagcccccgcaattgaaatgctcgcacagtgcctggtcgagcttgacctctcacataaccccctgagtggtgctaacttcttgtcttctccgcttgagttgccaaagcttcagtcgctgactttgaatgcggctagcttgacgtcatgggagcctctcttgtccaaattaatagccccatctttgacattcttggatgtatctcacaatcgtttgaggggaccactcccccgtctgagacagacttacccagagctcaagacccttgtggcctctgacaaccaaatcactagcctagaatttgaagccgtaaaagggttgcaggtcttggagctaagcaacaatgaccttgattcgcttcccccgaagattggcctgcttgctgctggacgctctcctcagaattggggcaatggatcggcactgagacgttttgaggtggctggtaatcgattccgagtacctcgctggcaagtagttgccaaaggaaccgatgcggttttgcaattcttgagagagcggattcccattggtgacctgccggaatgggagcaggaacacgaagctcccgaagagttctaagacatgggatctagttggagatcatgatttagaaaggcttgtataatattaccatgtttgtttctatgtacatatacataatatcgctgtccatgcttttctcgggcttttatcatcccatcatcagcttccttgaggctttgtgatggatattcacattcagctttttacaattgacttgctgacctcgtcaatcaccttgagccacgtgttcgaccatgtagtgaacttgtcggcaggtgcatcatccttagcatctgcagcgccccagggtgatgcgaccagctccaccgcttgtgtggcacactttctcgtcttctgtagatactgggcagaggtttcaaaattggcctcgtacaacgcgccagctgcctcgtcgacatcgtccgggatagcttgcagattcagcatcaaggaatccagcttcttgacacccgacgaagaagccaacggtgcatttccggcgttcttcagccggttgttgatgatagctgggtaaacctgggcaataggcttgaggaaacggagggtagatttcttgtgttcctggagggcagcggtctcttcttcgtcatcctcatcatcatcctcgtccttatcatctccggccttctcctcatcgctgagaatatcatccaagaaaccatcgtcctcttcttccggatcccagtcctcgatttcctctaccgcgtcgcgaaccaggtccctccactgctcaacgcggcgcataacaaacccaacaacccctttattcgcaacatcggtcgtggaatcacacgcatcccagacacggcccgtagcgagcatcacagcatccttctcggatttcgtcacgccgctctccttccctgtatccttcttctcctggtctttcttctctccaactagcttgatctcccgaaccagcgccgaaaattctgtcagagccgtcttgacaagtaccaggacctcggagtgaaacgccttggtgtattgcgccggtgtgacgagaagggatgcggtcacgagcgacggcagcacggattcattgagctctcggagcacggtgctgacagcggaatgcgtgaagggcgaggtaatagccagcagggagagttttgtgacgtgtgctttgagcgcgctcgaggaggccgctagtaggggcagggcttcggcatcttttgcggcttcagttgcggctgttgggagcgtggtaagggctgtttggaattggctgatgagggttaaggttgtgccgaggatgccggatagttgtttggacatcgtgagggtcgtgggctggccaagggtggattgaagaagagtgtagtagagaaaaaattcgggcgataattatcgcggggctgattagggctctgcggggtcacctgtggtttctatgtcaaagctacggagtaagtcggggtgacggcgaaaagaccacgtttgcgcttggctcttggaacacggcaacactatcgccattgtacgtggtctttcgaggggaaatcgtggtcatttcacccagcgctcgcgttagagcattgaatataacactagccaagttaggtttagcgcccttacaggagtaagtattcatcatacatcaacgccctcggcgcgtacattatggataaaagatataaaggcagtctaagtcctcgttcagatatcatccctaaatatctttaaccctatacttgattatctataataactgtagagagcggtcgaatcggtcttaacctggtcttcttctagtccccgtcgcggtgctcaaagatagtaatctttttgttaatattatcaagatatttgcctcggcatcctttaacgagctcttttagaatgtttagataaagttcccgttttgaacggttccggaggcttgtctattatatggcgcctcgtgaaattgagggaaagataccggttttcatgcggagacgagggatattctggaatgtaatgaagatctatctgtggttactttgagggcatgtggagtctgtcaaattctccggaagatgtatagttgttatcatttcttgagcgtggaatgtcgttatccctaaccaaggcgcgctgtattcagagttcactctacatacaagctgttagggtcgtttataccgtgatacttagttcgttgatagcattgctgctcccctcaatttttggagcactacatcttatcaaggagatatggtataacgaaagggcgtaggacggagtagagagccccatccgttcatgatgttacttccatctttcttctaattcggagcggctcgagcttaagatctcagatataaaagcaagctgtatggcagcattagcatgtaataatcagttacaggccaagaatagaaggaaccaataactttatgacgcttccagttctagttacgtgcaaatgccaagatatcgagcatttcactatcttaactagaagttttagatagacctaataattagtatcgcttatatatactgcgactttaagtagtaggataattaaaagactaaggatttactagtaggcttactaaaacagctagctaggtagtattagcctctcctaaatagtgttaaagagctctataagtactataaagctagaatacaactattagctgaagaaatttccaaagtcctcctaatcgtagtagcgatatttttaaaactctttattattattaatatacttaacgaatgccaggcattagaccggcagcattttatattagagctttttaaccttcagatacaatataatgtaaatatctttgcgacatcgcgattcatatcagaaattatagatcaattcaaagacaccttatccttagagatccgtgcgaccagtaaggacgttgggatgtacctggaaagccatgtgagacaactacgaccttgtgtataattggcgctcgccctctaaccgccgaattatcactctggcaagatcgtctattatctaccaaggttcctccgcacggccgggtagcctacctgataacagcatgtgcaacgggtatggcagttggtgtacaaacgggcttaaaaagtctgccagagggctaggatctccgtttcatggtccgggttgcgttatttagtcagcgctttccgagaatattaaactcgcactttccgcgtctttgcttccttcactcttcctactactcctccttagttctattctcatcttcaccatggcttctcctcaagatcccccgtcagacgcgtgtaaaaaactcacgatctccgcaaagaactttacggagcacgcgagttttgccgagtctgtcaaaggcattatctgcgaggctaagcactatcagctattaactgtgaccgacgttcctctcgggtgggaggacttcctatgggaggctgacgaagacctgccggcaaataggaagacctacgatcctatcacaggtctactacgtgtttccatcatgcctaccaatggtcacgatgtagcaagcggatggttatcacgggcaatggtgcggtggactcgtgcggggcttacgattcctcaagaagaggacattctgtatactatgtctgatgcgagtaagttactatgatggatctcacgttaaccgagctaattttaagtaggcattgacttcaaatacggcgtatatcgaggctggagaaagcaacctgacgccgccttccgtatagtaggactgaatttgcctacgcttgtcgtggaagttggctggtctgaggggtatcctgatctccttgatgatatgaacaagctgcttgttggaggaaatggcgatattcgagccgttatcatcatcaagttcactcaacaaggcgtcaacgtttcaggcttcctcgaggtataccgactcaactcgcaaggcataccttacctcgcgcaagacgaaaccgtcttccccactccccaagggcaagcggccgctcagcagcaagtacgcgttacacgaagcgagctttttgggaagttcctcgttccaggcatgacgggcgcagatattctccccctcgatgtcgattggctccgtagcatttgccgctcccaaatcgcactgatgggactggttcctgtctaacggccttttcttgtctacacttgcttcactctctgctaacctacttgctctataacatcagtatcaatggaacgcgttaatatgttctggtcggtacttacagtaccagagttaacggccaagcagtcatcctggttcttgataattgcattactgatggtaacgccattgctctcgccaacaacagaggcatcggagttgtggccaccgttatcatcgccgtccgagttcttacagattcgcgattctaaaccgttaactggctgtccgaccaatagacacacagtattcgcctccaaccgccacattcaattggtggttccgtaccgcaagtggtacattgtctctcgtgcttctcctcgttatacaaatttaaagtcctcttttggcgctgcatgttacgatctggggctaagtggagctgtcgagtgggtcaatgcctgtaacgaactcgcacagagcgtaactcttgactacgaaaaggtaggcgttccagcgcctgtgactttcgtcttttgatttgatttgatctcaaatgtagagaactttcctggccagtcccaaaggatatctcgctgcaggcgtggaggactgatatttctatctcgctatatcaacattggatttgccattcttttagacatgaggcctacaggggattaaaaaagtagctgtaggagggttttagatccaggtcaaataaccgataatcaccactctttctgggctgaacgacgcggcctactgctgcgcgtatcggttttcttgcgcatactaatacgccgcttaatcgcacttagcttagctgatagaatcgattctttgtttaaattcgtaaagctatcttgtatccggatattcagcgtgtctttcgactcctgtattatattggctgtatgaggtttcctaccacctcatctagtgtcgccatcgtgttcgtggctagtgtcattcttgaaagacgattcttataacggagaaaaaggcatagcagctcaccaagggaaatactggacgactcttcggtcctgctttaggagggcgatacgatatattcaatgagcgtcccattcgaccggcggttgcgaaatactgcgctggagatgtcacgttgttaccagatctcttcaagttatatgacgcgaagctacatcgacctggagagggattctgggagcttcatatgccgtaagcaacccaagagcggatccggctttcacaaaatccagagtttgataattattcgaaatcaaatgctcgcgggccttgggatcgagagtctattgaagaagcgactaaccaatggaatgacgatgttttggataatgcattgaattgcgatgatgatgacgatgatttctttggatctgaagaatatgatgagtctggttgggtggataacggtctgaccagctgcagggacattatcaataaccgtgactacgaagactactattcagattagggtataaacaggctcagttcagttacaataggatatagtacccgtctgttgatttccatccgcttgaacttacagtactgaatctgaaaatgaatactttcttcaagaatgtactgtaatttatgtaaagaaaccacgactttgtccgagagcggttgattatatttaatcattggattatcagctgaaagattttctttcagaacccgatcacaacattgtcgagaagccaccgaccccaagaattctcacttccatcaccgggtcacgggctgagtgaattcagcctcatggatttatgccacgtcagacctgcatgtagggctcgaaattcacttaccataatatacgtcccccaccttatcgcgcaaccgtcgtatagatctcagctggattgtgttagaacatcattaggtggacttggtctatataagacaattggtgccttagcatctgcactcagccacaataacagtcaaaataggtgacctatacaccctaacggtagcatctaaaggtcgacaatgtcacgtctgtctagtgttcagtaggttgcccatcgccctgaaccccgtcagctaaataatattagaatatcattcggttataccgttcccctaaaacactcagcattttggtatacgcacatatatattaattacctatatataccatatatcgcatttcctataggtgttctggggtaggcggcttacttaccgaatacaatgactgttaactagtgagttatgtgtcagaatctaggatgaatactgtcatttttcatccctgatacagttgggtcacgtgactgaccaggttggttttccgcccgaaaaacatcctttcattttgttttatttgtttgattactaagttgtctatcagattatcatgttttctggactattgtcatttttagagagttagagaattgattgagatttttctgcaacatatacattcgccttaccaccgtttttccgtcaagattaatagtaaaaataccttactggtaggacgtatataggacgtagatagtaagaaaggggctgtaataggcgaaacattcggcgagtaacagttagggcaataaaggcgactttatagacacacacacagcgatgtcagtcacgtagagggagctagacccaaagaggtatactaaaccgaaattggtaattcgccgtcaccgcagagtacggagtacaatctaggttattatgagtctcatcacgtgcgtcttattgtatagcgctgcatcgctacatcgacaagtcagttaccttttgccgatatacctttaccttacaatgtaaatcatgggtatatattaagctaaacatctccgcggcattcccgaaatctcaatataattataatacaaatagtaattcccttcaacatgtagtctgcgtaaagataaattttaaggtcatatatatttatgatactcgctgggtaaattccttgtcgactctaatctctgttaggggaatctcatccccatcagaatgatcaccagcgctcggacccaacacattggtgtacgtcttcccttgatcatagtccggcctgaacgaggtatccatccctggctgttcccccggggagttaggatcatctggtaagtggtagaaagaatgtcgtttcggatgcttgttgtgctgcatgatggtggaagtggattccgcggttcctgaaggctgagtggcagcatccgtggttttggcatttgttctgtttgtacttctgaagatagccatcatggtgccgctgatacccagcatgcgtgctatgaaacggagagcagggcgaatggttgggaggttggccgagacgatgccggcggacatttcgatcgcggtccagccaactgttcgggcgagagtgtaggaggaatcagccgaactgtagctaaagagtactgagaaacggtaggcggaggcgaagacgacgctgttgaagttagattggttagaaaatgatattccagtttggaaatgtgttagtggcttacaagaatcccaagctgaaggcaactagcacggctaccttttcagaaagtcgaagttggagcttccaaacttgtggaattggaaggaatagaatggcaacatcagttgcgatcgttgagacggcgttggcgacccatgtagcaacttggtcgatgcaccggcctgggagctgcggataccatagtttctggacagggacgcagataaagatgaagagaaaggttatacagataacccaaaggatgataaaaagcccaatgacatatgcccatgtcttgaagtaagggaagcggaagatccgatagtacatgagcagaatgctcaatttggtccataccaggttgtacacgtagagaacttcggccacaacaagaaactttgcaatcataatcacgttttccactggaatagtgtccgcatggagccccattcccttatggatcatggcgtagatgaatccgacaacgatgaagttccatagcttatgtttgatcagaaaccatgcggttgggaatcactagcgtgcgagagtcgaactaaccatagaaaatatgaccatatagtcatcccaccacagcttttgcatccgctcataccgggcgagtagtcgaagacaaaccgtcacgaaggccagcaccgtgacagaggccgtagttgctacagaccatggctgcagactgtcctggttgctttccatgacggccggttcagggaggtagacatcgaacaattcagcgaatgttgggcaatagaaccttatgtatggagtacggagtacgcggctgagtttctgcacggaaaggctccatatttgtgtcgaatacacgcctcgtaatattccataaattccacttttgaacgtttaactagagtctgaacttagttttgtggttggcccacagcgggttaggcctctgatatcaccatgctgtaatacataatgttgtatgtatcattaatatgtatcataacatgtaaaatagactgtaggaattaagtaaataacggcttgcagatccaaagtaaaaagatccacgtggatgcagggggtttgaattcattttacgaaggttttggcaatatgaacaaggcccactctattaaacaaggaaagttacggaggagacagtgacaggacgagaaaaaccccaaaaaaagaaagctcccaaaatggtgaatgctagtcttaaaatattgatttttaggactattaaccgggtccttcagtggcgtttgttagctttccatatcctcgattctatacaaagtactccgtacaatggcagtatatgtactagtggttgtactttgttaccatctctagaagagcctcatccacctcctttgggttggtggcattcaagtaatgcgcacccccttcaatcaacacaagtttagcctccacggacgaggtgaaccgtttaatgtgttctgcaggaacggtcgtcccaaagggagtgtcctcagttcccttatggaggcgttaatgtgcaaatcatctacaatcagtgaacataggactcacctgtagccaataaacaggacatttgatgtctcggatccgaagcagaagtccatccctctccaataggcaattgagcgccattcgaaccttctttcgaccctcatcacccttatacacctccttcaaggtctgggtccagaacgcggatttggtttcggtggcagcggaaccaaagccgattccccccaccaatccgcaccagacgtcatccacaacaaagtcgggtgtagccgagggagtggaccacttctcataaaacaccgtgaggttggcagcgggatcccaacagcccttggagcgagaatccgaggattcataatccatggaggttccgaggggcatgagaccgagaatctggcaataagttaataccattggcttggcttgtcttgaggcttaatcagcagtccatttaaccccagggcttagacctaccctctccggggctaggagggccatcctagtcacaatccatcctccctgacttgtccccaggacgaaggctttctggattccaaagtggtccataacctgcagggccatttgagccgaatcccagtacgtgaagtgttccgagggagaactggtcgagccatggcctaatggctcgatggccagaagattcatggcatcggtcaaaacttgattgttgaattgatcatcgtagagagacacggtcatgcacatcgaattcataagcacacatgtcggcttagaaggatcatagtgattcttagagaaggcatatccagccttgatgccaccaaggtgtgggactttgacggtttgaggggcagccatttcgtaatatccagcggtcttgagatgaatgtgaataatctatgttgtgcaataatatacttttagaaggggggggggaagcaagtcattatgccgattaagggggttcaggcaagtgagcccctctatcttggtttttttttcttttttttttcttttacgtctttagaatgtactccgtgctccatcctccgtatggagcatgtcaagcccgagagttgggcaacgctctcggcatttcggcctaaattagtgattgatcttcaattgacagtcctgtggagtcactttcgacagaccgggttgtcgggatttgccagacttctgcacccaaagtataactccgtactaaagctgctcggcagtggggccggatggtttttgagatattactagcacattcaccctctaaaagccaattcaccatccgcgtattgaggtattttggaacataccgttagcggtttcagatacgaaattggagttgtgcatgtcatgcaaccacaagcgcggagatacgtctgacatcgtagccaacagatctgaactggcttcgagactagtccacgggtgggtacacacaggagatcatctgatagagcatccgcttatcccttgctttgggcgtgaaggatctgttggagacgtttagcaggccactctatgtactccgtattcatgattatattaaccgcttgtttaggcaggacggcttttcgggttccacaaatcttcatttccagaaacggactatattggcaatagagttcgcctctccaggtgtattgtcatatggttgtaacgcaaaggttacaaccactaatttagagtgtctggatatcggtgaaatgccgaaagcaacccgttaggatgtgtctaatatatatatctagaacctgtacggactactccgccaatatagtaggagttaatataaatagactatttaattaagtgaaccttttcttagacgtggagataatttaatagttaaacatgagagtgagagactgtgacaatataaggattatacttaatacaggctcagcacttaatcctgacctttagtttctcaatacactttctaccagacatggatcggtaaacgcatcggtaaacgcatcggtaaacgcatcggtaaacgcattggtcaacgcattggtaaatagggtatgtatgacttgcctcggaagaattgtttcgtgcagaccatggcggagctacttagtcacggatggataagtaccagattacctaagcaggaattttcaatagcaaacaagacaaacaccttcatcattgcatcccagcttaacagaagctgaaagccttttgtccatcattgccagccataatggtagcagcaaaggcccgtgctcctccaaggacgcccgcaacaccaatacagcccgtggagacgtcgcggtaccttccagacaagacctttgttatcgacaatggcgcgtacatgatcaaagccggctacgcttctcatgcttcggcctccgacgaaagcgtttccgcctgctcgtcgatacctaatgctctcgtcagaacccgcgataacaagattgtcatcggtgcccagctagcgacagtcaacgactggaatgaggcgatgtttcggcgcccggtggagaagggatatgttgtgaactgggaagctgagagagagatctgggaccagtctttctttgatgggaaggtgacggctcggaatcggaatcatcatatcgcggacccggaagatactacacttgtgcttactgaggcgccgaacgccttgcccattttacaacggcacgccgatgagatggttatggaggaatggggatttggaggatatgcgagatgtttgggtacggtagtctcatatttggtgatatgatcccgtactgacttgaaatcctaggtcccaccctcaacgcatggaacgaaatccattctctcttcggcgatccgctctccaatacatccgacgcatctatcttgcccgcagattgcttactggtcgtcgattctggctactcgcataccacagtgaccccggtttacaaaggccaagcgcttcaacgcggaatccgaagactcgatcttggaggcaagcaccttacaaactacctgaaggagattgtgtccatgagacaatacaacatggtggatgaatcatatatcatgaatgaagtcaaagaggcggtttgctatgtcagcaatgacttttctggtgacttggagcaagcatggaagagtcgccgaaagcgccagagtgggcccgaagagggaatcgtgttggactatgtacttccagacccgaatgcgaacaagaagggcttcattcgaccgcatgatcctcttctgcatgctaaaaagaagaaaggagcggtttccgggctcagcgcggaagtgttgtcggaggatgtactggtgctgggtaatgagcgctttactgtcccggagcttctattcacccccggggatattggtatgaagtcagccggcatacccgatatgattcttcaaagtttgtcggttctgcctactggcctgcactctgctttcttggcgaatgttctcgttgtcggaggaaatgctttgattccgggatttatggaaagactgtgggtcctccaaagttaattggttgaagtttttactaacgaactatctttttatagagaaaccgaattgcgacagatcgcctctgctgaatgtgtcgtgagagtacgccgggctaaggagtgagtggtcatccatctggcttgatcttggaagtactaacatcaatagccctgttcactcgacatggctaggaggcactcgccttgctgcaaatagggaggaactcagcaaagtatccatcactcgccaagaatatcaagaatacgggtcaggatgggctgttcgacgatttgctggccttgtataaggtcctagtggcctgaacagtctttattatgcacgggagttctttttaacaatggcggaaatcggcagcattcatagcatttagtgataccctagttttcagtgtcagtggtcaatgtacacaatcttttggaacgaatataaaaatagttcaaggctagaacaccgtactccgcacattacgatgtgattattcgctctaatgttggaataaaccgtgttcttgcctgcttgggaaatccccagatccatggatccacgtctggtccctgttcatctctacttttagggctattatattaagcacttcgaagtcatctccatcattgttttgcgagtcaacggaataaaagagatcattaagaagagttggtctcgccgaagccctcttgatacactggctacaagaccgcaacccctaggatgtagctgtcaccccataattaaccatgggctcttcaggaataagaaagaatatagcgtttaccaatccatggctaaaaatcccgtacctgaaagatgagatgcaccctgcacttctacataagaggatgtctttcccatattcttagatctggccatgcaatttatccccttttgaagggcccagcatcgatcctccaagttgataccgaatccacggcaatatggccaagagccgctcgtccatccgaaaactcctagactacttggagcgagtatttgcatccaagaaagttagcgaggaagtaggcctgtcagtaaagcacaaagccaatcaaaagcgaatcgaaaagcaatacattaactctcttcatagatgcacagggtgctttcaaagggtcccaacgaccaatttatttactgctccttgtcagcaccaatactgcccctcatgcctccgtcgaatgtcctcgacagccttgaacagcccgggtatgttcccggcaaaatgttgtttccaagagattcccacaacagcacttgaggcagtgatgagcccacgaaacataaagcgctataccgttcgatgggaagagaatagcatccctccgctagagcgcttgtactgtcctcgggcgacgtgtggccgatggattcccccaaagagtcccggggcacggttaggatattgtgtctgtcctcattgccgggcaaaagtttgctacaagtgtgggaactttttccatctcgcctggtcgtgtagccatgactctgagacgaaggcgaccttgcgactggcaaaggagaataaatggcagagatgctctaattgcctgtatttcgttgagaaggtggatggatgtaaccacatcatttgcaggtgtgggcatcaattttggtatgttcatgcatgcaagtcctaggcaaaaaataacactaatcgttaataagttacctttgtggccaacgcggccgatgcgcatgtcctgcacgcggtggcggatatgaagacctggacacagatggaggggatattgattttaatacgctggtcgctgcaatggagcaagcggaatcgacagatgaacctcattggtgggacgatgaggcttagagaaaggacgaggagaagtaatcaatatttatttcccagcaaatcgcaatctagaataatacaatgcagggaagatatcttgatcgaaatgctttcttcccatacgctcagcaactagtagtcgtagaaacccttgccgctcttcttgccaagccagccagcatccaccatgcgacgcaggagaccagcaggtctgtacttgctgtcaccagtctcctggtgaagaacgttcatgattgcaaggcatgtgtcgaggccaatgaaatcagccaggacaagggggcccatgggcacgttggtgccagtcttcatgatactgtcaatatcttcacgactacccacaccagtctccagacaaatcacggcctcgttaagataaggcatcaagatacggttggcgatgaagccgggtgtatcggccgacacagaggccaccttacccatccgctggacaaaggcaatggcagtatccgtggtctcctgggaggtctggagtcctcggataatctccacacccttctggatgggaacagggttcatgaagtgggttgagataacccgggacgaagcctgaaggtcagtaggatccgtgttggtggcagaggcgatcttggtgatggagatggaggaggtgtttgttgcaaggatggcatgcttcggcgcgatctgggccaagctggcaaagatttttgacttcagatccgggatctcaggcacagcctcaatgacaaagtcgacaccggagagaccttccagcgtcaaactcgtagtaataagcccgcggacttcatcagcttgctcttgagtgaggcgctgctttgctacattcttttcgagaagtttatctttcatccaatgccatgtcagataattccaggcgattgcagtaaataaactagaagcgtaccggcaaacttaaggcccttatccaaagaggcctgcgaggtatcaacgagagttaccgggacctttgcattctgtgcagcgacaagtgcaattcctaagccctgaaaagtgttagacctgcagcgtagctgtatattctatgttacacaccatttggcccgcaccgacaacgcccagtgagttgacctcggctgcgcggactgcagaggttgagcagaagttgcgggccaccgcagggcctctgcggagggaaacaaagcgaagagtagaggtaagcatggctgcagtgatttctggaactatgggaaaaagaacaaaaggagggaagaatataagtgcgcagaagtatactgctatgacttcacgtgctttcggaggtcattgtaaggccctcgacagtggccaccaagcgtatatttcaccgccttgatgattccatttgcaaataacgacttcttcgaatataccggcttcattttacgatcacattatagatccatggatatagagcagagtcgaggattaatgttgagtatcatggggctgcctgttatccatatcattcagaagaaaggccccgaaaagggaacaagcccaaagcttgagtactccaaaaatcaaaatcttggaagtgttttaaaaaagtctagtgagaaattatagctcttgcaatatccaggccaggttcttgagaatatatctgaggtcttgcaagttcaagggttacttacctcttactactcagatctatagatctgatattttgccagatattgatattgccgcagtggccgttgatatttggcgtaaacatcggttatcttcggcattttggcggcattcagtttctccgaggcgccgacgccgacgcgtcnnnnnnnnnnnnnnnnnnnnnnnnnnnnnnnnnnnnnnnnnnnnnnnnnnnnnnnnnnnnnnnnnnnnnnnnnnnnnnnnnnnnnnnnnnnnnnnnnnnnnnnnnnnnnnnnnnnnnnnnnnnnnnnnnnnnnnnnnnnnnnnnnnnnnnnnnnnnnnnnnnnnnnnnnnnnnnnnnnnnnnnnnnnnnnnnnnnnnnnnnnnnnncgacgccgacgcgtcggcgcgttcccattcaacccgattcgggaagcaaattaatggggtctcaaaccagcccaccatggatgaagaggttgttcctctaggacacgacgtgcaagtcgtggacccagacgtgcgcaactatgtttacggcctggttactgctgtgagtacacttctattttctccttgccctggctctgggtcaattcgctaatacgcttggttatccagctcggaggattcaatggcgaagatgctgaccaatacgtactcggagacgatgcgctggcatgtctacgcgatatcaaacgctggttgaaattgtacgatgaaaagaataaccggatggatgttgcgcggtgccttggagaggccaacttgatcaatggtgatctgcttccaatcctctcgctctggtggactagtgggcagaacagcaagcatatgaccaggattgcactggcgtgcttggaacttcttgtgcccttaacatggcccgtggagattcatagccagatgacagtcaaccaccatcgtcataccccctacatccaacagacacaggtgcaatacaagcgaggtatcctgaggtccggaggattgaatattcttcgcgcagtcattcgaatttctcttccaagcatggccacccctcgatccgaacgtggaacccgagacgaaggaattctcaagttgatgttgtacttgctgcggaatattgcgatcatatccccgaataccagacttgcggcagaaggtgacgaggaggagacatccagatcggcaacaatcaacgccttccatgagcaagatgcatttgccctccttttgactatgtgctctaatgtcggcgaagacttcaaccttcaagatattcctctgatggagacaattttccatattgtcaagggtgtcaacgtcgagaaattattcatggacgatgagcagcgaaaggccaaggggactgacgaactcggcgatctactgagaaaagaattattggtacggagggaatacgcaaagaatgcacccacacgccatggaagattcggtacaatgatctgggtcaaacgagacgatgagaagatgtctactgtctctggacaaagtgtattgcgcgacgaccagactacactacaaaagatggacgagagtaaaaagtggaataagcctcggcctcgtcgcagacaggaagatgtggaccaaaatagtaacttcaacatgccagctcaccttagttccgaggcaactaagaacctgaggactttcgtggaggagttcctggattctggattcaatcctctattcacccatgtgcgaaaagcaatcgagcgtgaagctgagcgtgtcgtaccgataaatcatcgccaattcttctacctagtgggttggttccttgaagcggagcgcatacggcgggctcgacagctccgtcatcgcacagctcagaatggaggaagaaccaaagatattgaacccgatagctatggtctggttgctggcgtcctgaaccaagagacgttcatctctttgaaccgtgctatgcagaatagcctagacaacaaggaatgggaagatatcaatgcccagatgcgctgcttcacccagattctgctgactgtccaggaaatggcagtgtcaccgctcgaagaagaccaggaaattgcggagaatattcaaaaccgtattttctacgaagaaacaacccatgaccggatccttactattgtgcgcggatacaaagatcaaggctttggctatttagatgcctgcacggagttagcacatgtattcctgcgaatgctggaacggtattccaaagacaacgccgacatgcaaatccgctcgcggcgaaaggccaaacagaagcaaaagaaggccgcccaagtcgccgaaaaagagggagaagatgatgatgaggagcgtgattctgaagatgaagacatggaggaagccgcccaggtcaccaaggaacgcagctttgactttaagcgattctcagccaaattttgcaaccaaaactgtgtggataccttcatttcattcacaggattctaccgggagctcaaccctgagcagctcaaacgcgcccaccgatatttctaccgtattgcattcaagcaggagatgactgtcttgctatttcgtgtggatatcatcggccttttctatcgaatgattaaaggcccaggccccatggactcaaacgagcctatcttcaaggaatgggaggaattggtccggcaaatcattcgacgactagtcaaaaagcttgagcagcgccctgccttggtcactgaattgctgtttagcaagatcaactccactatctactaccttgaatatggacacgaaaagcaaacgatttccacatataagcgtcccccgccggagctcatgattacatcgacggaggcgacgacaagggaagcgaaactgcacatcgtggttagtgctctcgttctcgatggtagagcagatctggctacctggatcaaggatgtcttgagctctgcagcctccgaaagagaggactgggaaactcaagaagaagtaaatcgcgctgagaactccgagactaccggcgttcccaatccgatgattcgtatgttctcctaacaccctatttcgcgactggtactaacaacaaaacagctgtcaaaggcaagaacgagtttgttcagaatgccatgttctcgaacgcaaagctacgtctgctcatgaccgtcgtcggattcgagcgactcggcgttgaagatgtgcttggtgcctcttgggtcgtcccggcgtctctcaaatccgacgacttgcgtgaaacagtttctgaaatcttgaaagcccttcaaaacccgttctccggggatgttaatgatgatcctcggaagcagatccaaccaaagcacagaggaagcggtcgcggcagcactactcaaggcacgcttgatgtcaacttcggatcagagtccgaaggtgaggatattccagatggtcctttattcccagcgaatctgcggtcaaagtctagtgcgctggatgacctcaaaaagaagcgcaagaagaagcaaaaagccaccacagaaacggagccactggatgaagagactctagaggcgcggcgcgatgcgcgtctatcaaacgcactgtctcgccaagcgaagatcaagagtgatctgttcatccatgccagcgacgaagaaagcgatgcagaagccgacaaagagttcttccgacttgaagaagagcggagaattcaacaagcaaaagaaatcaagaaggcgttgctcactggacccgtccagcctccaagaaagggcagaggcaagaagtctgccgcccgcaagcgaactagcgacactggcacttctgcagccgcaaaatccaagcgacaacgtcgtgattctggttctgctgctagcgaggctgggagtgatgccgatggcgatatcctcatggcagaactcgacgttcaatcatctcactcccagcaaggaatctctactagtcatggcgccggagaggacgaagatacccgtcccacgccaagtgatgatgatcttgcttttgatgatgatttcgccttcactcgagatcatcctagcaaaccccaagctacggagcccgattctgtagacgatgacgtggaagatgagcctgtggttctggcccggagacgtatgcgcggtggatttgtgattgagagtgactccgaatagtgagctcactttgatatttgtgagaagtttcgattatgatgacctgatgaggcgtttggcattgtgatggaaacggaattgtaaagcatcggatacctaagctcaacgagaacaattacgatttcatatttcaggttatcgttctatccagcatagacaaactgacaccctacaaccatgccgagccccagggaatgcgccagtcctgcaagcgagggttggcatcttgggcattgtggaggatgagaatttgtttgtcctgttcgtcggatatctgtgcaagttccacacatcttctgtcgtttaaatacttgaattgttctaagggggcatgtctgtgagtcaaaagcgaaaagtgggggacttgcaactataaaaaccacccgacgtccccgacatccccgatatccacgacatataccaatatcccaaatcccaacatgactcatcttacattcgtcaccctcgatgtcttcacatcgacaccctacttcggcaacccgctagcagttgtcttcctcccagaagacgactcaaacgctctgacgcagagccagaaacaaacaatcgcacgggaattcaatctatcggagagtatctttgtgcacccagtacgcgagaaaagcaagcgcaccatcgatatcttcaccgcagactgcgaaatccccttcgcaggccatcctaccattggcgcggcctcctggttcctgagtcactcaactgaccccgctgacggcgatggcgtcaccaccctcgcgaccaagtccggcgacatccccatctccgtccagaacgacgtgaccaaatacgtcgctgcgcggattgcgcacaacacacgcatccatgctacgcggttcagcttgaaggaattggtgaggctgcaccctacgctagcgccgttcttcacgcggccagacgttactttcccgctcttttccattgtcaatgggatgagtcagttgttcattgagcttccttcgcttgaggcactggctgctgtgacgcccgcgaccggcggtgagctggtctctactgattatcttgatgaagggtggaaggctgggttaatctgcgtgtacttcattgttcgggatgttgaagatagtgttacgaagaagaaggttattcggtctaggacgatactgggaaacctggaagacccggctactggcagtgcggctagtggattggcggcgtacttgacacttacggagggtaaggggggtcagaattatcagtatcacgttgtgcagggtgttgaaatgggacgccgcagtgatattggtgttgaggctacgttgtctggcgacaaggagattgaacaggttgtgctgacgggcactgctgttagcgtgtccgagggaaaagtgctgattcctcatgcctaaataacaaccctagagctttaatgagtcataatgcaatacttttgtatagtcttctctggcgcaacggcatctcccaaggtcaaggctgcctatgattaaattcattgctgcctgtcgagagaaatagctagattccatagtcctggaggtacctagtgaagaggaaaggcacgatgggtagtctggcagagcaaccaacaacaccaaccttccaagtaggccaactagcaagtataggagatcatggaacctcaatcattcaaccttcctagtagaaatatccttgtaaaatgctaagtcctttcgatttgatatgatgagccaaaatacctttctgcctgaacaacagggcaactacacgatcctgataccccactacccaaggtagtagtactaccctcaagttcccctcacgacttcggatatgcaatccaccttcacctaccttgtgtacttcctatccttctgggccaccatggttgaagctcttactcggtatcagaccacgcccccgagcgacgccattgtcgtccatgacagacaatccctcaacgatctagtcaagattcactcggatacagttctctacgccgagaatggagggtattacctcaagaacatggaagaagaggttgttgccatcactgccgacgacctgtgcaaggagctggacgctgtttttgccagtatcgatgccgaagttggctctgggtctgaagatggagaatctggatctctcggtggggcaaatgttacgaaggggaactctgtctgagctacacagattgtcacagcacatggcacacggcacactgtatctagagtgtgctgatgcgcttgatggtgttggaaaggctccacaaaggccccgggagatttggctggggcagtgaggctggggcagtgaggctggaaaagaaattcagaaaagtgggcacgtctgagaaaactagctacgggcctttgggttgcaccagaagctattgaccactaaagaggctaagcccattgaatttattgcatccatagatagtgaattcaaggctgacgctagcataccttgtccccagagagacctaaaatgggattgctgtatcatccgtcaagcatgcttcttcggtaaaattgcccaagaagacatgtttccaacgaaaggtcctcagcctgaccgatggagcaagccctcacatacaaatcaaccggatttccggcaggctcttgactttcgctattgcaatctgttagaaagaagcccttgccaaaatatcatcttaattgatttcaaggtcccctttggcccccctcttcttgccagcccagccatcgtatctgtctcagcgtgcacgtgaatggaggcgcagcggtggtaaccctcatgctgccaattggggacttggctttattcgtggttcacggagtacgaacacggagtctccccccggtccaaaaaaacaaaatggaacacttcagatgaatgttgcaaccacccaaacattacaaatgaatcattctgcagaaggcggtgtttgttctcattctaaatgtccggtgtgctgcgccacagcctaggcagggtcagttctatttcgggttaccacaaggctgagtgcttgccgtggcgtagcgtttggacttcaggggactgcaactatgtaactaattatgattctacataggtagccggccttgcaagtctaaacggttcaattatctacattttattcctaaatttgcgcattaatggcgaaatcctctaaacttcatcggtatacacgacgccgagaattacatgcccgacaggcaagatcaaaggcacatcatgtacaggagacacatttcaccgaacctttggaacacgaacagtccccccttttcaagaggtatatcctcttgtacctatcactctactcctaacattgtaaccctaggttcttctcccttccacaagagatcaggaatatcatttacaggaaacttctcgtgcagcgatgcaaatttgatttggaacactattacccatgcaaactgcctattttttatggcagaccgggcccagatccacatcgccgggttatcgacagcttcgaaggcccccaatgtgcagcctgctgtagctacacctggaatcgggcacaagtcccgatatcgaaatcaccagcacgaagccagtgggcaaagccatataaaaatccatatctttgcgacaattgctatgggacttgaacgaaagtgttgacgggattccgtgcttgtagtttttaccatgcctatgcggaagacatgagaatctagccattctgctcgccagcaagcgattctggaacgatgctgcaccgatcctctggaaggagaactggttcgccttcgaggatcctcccctcctaacgggattcctgactgctatccgcccgcaagtgagatcgtggctaaaacggatatcgtttatgcctcttcatccttatctgactagcggtatccccagtagtacagatacatgggtgccgggttcgatctggaatgggtgggatgatattgaaaactgctggggtctgctgagactatgcgaggggctgacagagctggagcttgatgtagtgtttttgacacgcaaggaatgggctcaggctattcgactaatttctgtcaagaaacaagttacctttctccgccagatgaactcggaggatgttgactatgtgactgaagattcatggaaccttatatggaagtcgcacgttcggcggaaacgattcgactcgcccacgactgctttactcgcttctagcatgactggtgacagggctattaaaagaaaagttctgctgaattattactctgagagcaccccacatcaaagatgtggtgattacggggtcaagtttactgaggacatgaacaagggtcgaagacgggtttcatgattgtcaaggacggcgtttcccgccaatcatcaacttcaaagcttcttctcctcaaccaattgcctcaacactttgattgttccctcaactgctgcctggctcatcttcttctccttctcgagtagctccgccagctccacctccgagacacctgggtgtctccattcgaagatatacgtcatgtacagctctccaccagctccttgactaatcacattgctgatcttgcttccatttggctgatcaaagtctacccgggcaggctcgaaagctgtaacggtctctagaaccttcttctgggtttcgcggaagaggacttcgcgaacggtgacggcgttcccagttaatgagtcgatggattcactgacgaccctggtggattgaattgctcccggaacgaatgtttctgcggagcggatcttgaggaggaggcccttccaggtttgttcgggggtgataacgggtcttgcgcctggtgggttgatcggggcggtgaaggcgacgttgttggttgagctcattttgggaggataggaaaggaaattctcagtaatttagatcaatgctttgaggaattctgatcaccaattttgtccgatcttaaggcttttgactattcgatgttcgatctagggtgcgaagagcgatgacgaagccgggcgataacgctgataaggttaataagctcggcgttacggtggcccggagaccgatgatctctaagacttctgccttgtatatcaggcctcaatgttacccgatcgggacaagcagggtttggattcgggccatggaaaggaggacttgagaatgctcgacacaacgaaaattgagggggttttgaaatatgatgcccctccaagcaggttgcttatattcaaggctaatctgtatcttcctctggaatggtctgatgatccaattcgaaaagcaaaccctcgatcctcaagtacatagcgcagtgctttgcatatcagttcattcgcacgctccaagatattggatactattgaaattgaaatttcgatggattcatctttttgtcccataactaaacattcaatcaatgaactcggtcataacgaacgtggaatctctgaatgcaagagattcctatactaccgctaaatcaatcgaagaatccatgacccttggaaggcgtttctaaacttgggctaggaagttttactcgtaagcaatgatggatggcagaatacatcctgggttatgaaggtcaccagaacagcgaaggataccatggaagaaagggtcattccgctggtcactgacagatgagggatggatgctcaaacaaaccagttccccgataattccgaatttgtctgtaagcaaagtggcgactacatactatacgtacatgtatggatattccggaaaatgaaggccgagaaataaggttgttttagtgtgggggggggcgcatcccgcattttgtcctatctttagttcgcctatcatcagccacgaattgaaaacacataacagcaacataacagcaacataacatggaatccctgagttccggtctgatctacttggcagactcccgcatatcagaacctagatacctcaggcactcatatcatgtggatttaatctacaagggataacaagcttgtctgcacttgtccagaagaccgaggtctccggggagaaaatgaagtttccatgctcgatgatattaaatgccgaaggctatatcggggtgataagcgagacgcaaactggaattctagtcgtgattacgatattgtcatatgttcatcagatagaagatataagtttctgtacactccgatatgataatactacatgagttctagctttcaccagagacaacatacaccggagctgcacggaaaatgaccataatagccaactgtggcctgttcgaaagctactggtttttaatacatctaataatcaagaagctacgccccggtgtacgaatcaagacagcacggaatccgctttccacatcaagtcatggtggtcatcatatatcggcagagataataatgacataggaagcggaagcaaagaaccgatcaataaccagcgttcaatttgaaactgctttatcaccacggaaaatacgatccgggaattgttcaatacatccctgagctcaggctataagtgtctcgctgtagaccctccgatgaagcaatagagccagagaccttccaatcgattatatttctcatcacatcccttgaaaaccaaacaaatccaacagagaaccagcccgcaaatatggccgtcgcaatgcagtccgcccctatcagcctcgagacaatgtccgacaacatcgatgctgtcaatgtccacaagacagacctcaaacaagacaaaggactttacgatgaatccgaattcgacaagtccaaagacaaggctggcttccgtcagttcgaggatgcctgtgaccaagtcaaaaacttctatgcccagcaacacacccttcagacggtagcatacaacctgaaagcacgcaacgacttcaaaaccaagactcgtgcacacatgactgtttgggaggcgatggagaagctgaatacattcatcgatgaatgtgaccccgatacctccgagtcccagatgacccaccttttgcaatccgctgaagcaatccgcaaagagggaaagcctcgctggatgcagctggtcggactcatccacgaccttggcaagcttctctttttcttcggggccaagggtcagtgggatgttgttggcgatacctttgcagttggctgtgcgttcgacgacaagattatcttcggtaacaagtctttcaaggacaatgaagactataacaacgaggtctatagcaccaagtatggaatctattctcctggctgcggattggaaaacgtcatgctttgctggggccacgacgaatacctctaccatatcgtcaaagatcagtccacaattcccgaggagggcctggcaatgattcggtaccattcattctacccgtggcaccgggagaacgcataccatgagttgatgaatgaacatgatcataagatgctggaagctgtgagggctttcaacccttacgatctgtacagcaagagcgacgaagtcccagatcctgagaagctgaaggtaagcttgacccttggatatttggattctaccacgatgcatgctaactcggtactggacagccttactacatggaactcattgatgagtacttccccacgaagatcatcaggtggtagttgtgccgcactcttcctgtttttacaatcaaattgatactagctaaattaggatcagcccgttgtccctttaaacattccctgataattataaaacaagatgtaactccctattacgtatctcacatgcgagcggtgcacaagttgaacggcacagtccaaaacacatagtaagtgcgataaattacaacttgatatctcaacaacggtggtctattaattctgaaaataataacattgttgttggaataagcggccgactattcttgttctctatactttcaattctacagtatctatactagaactcattctatcgcccaccagattcattactgtaatatcgctaggacttgaatactgcgataaagtggagatatggagcatcgaattgtggaagcaaggagcaagaagtgatcgatcgatatgttagttgtggagagaactgccatagatccatatatataagctcatagggataacgaaaacgaaacaagagtcatacacgggcaaagagaggtctgaaaaactacctaatcaagtaacgacaaaacaaccaagcaggcaacggtacataaaaaatagaaaaggattctggcacgcattgtggcctgatttggatattgcctacatatttcagcgaccagctccttgatcattggcagcgagcatacccaggtaccatagcgctaacaagactgtcaattgtgattgcgcagcagttctaccactagtgaatggaatagtcgggacaagttcaaggttaccgtcgaaacataactagttctcggttagttataagaaatctatatcgagaatagtgctacttcttataccaattcacttaactaaatggttgacagtactccatgcgcacggtatgactgggatatgctgctatagcagtgttccatttccaagacagcttgatatctctaggagcgtggttccagcttatgccttccggaactccaagtgggtaaaatgaagtatcaggtgtgaaggaatttagaattattgcatactctccgacgtcgaactcttggaaaaatattgtcggatatcgtacttatcaaagcattctccgatatgatggtgaggtcggtagaggattcggtggaaggcgtgtctgtctaagaacgtttccatgtctttgcaaaatgatgttcaattcggactcgcgccagaccccaatgctgtggaattttctgcttcataggctgagtttgttgtgtcgagttgaatgaggtgtaggtatgcctacttggccctccatagctgagtagtgataatatgcaaatcaacattggaagccccgaaggccgggttatccccgagagacccttggctctttgttgtgaggtctcacagttgaaagttgtggacttgccgagccttcgcttcggtatttcagagatgcccgttcagacctgcgtcagctaaatgatgggaaaaccagatctaagcggcttatgaagaatttgtgacagagcgttcgattcggaagatcagctacaacctagtaaatcggggccaaggaagagcttgatcatcagttgcagtaaaaaacatatgcttcgtcgagtttcccctttgcatggtcgcaggcctggtgaatgtggttagacaacgtcatggcacatgccttcagagggaggagttctcacaaggcaatcgccaatgtcaacaacaatttgttcttcatttctgagaagctgctcctgttcactggtgatctgatgttcgtcgtaggtttctgctcgatcaaagtccatccacaccactctttcggcagtacctgtaacgaccatcatgttccttggtttgggatccctgtgccgcactagggccttatgtatttgttggataccactgatgagattatccatccgttgctgcgtataattctctagagtgatcatttccagaccggtgatatactccaagaatatggcgctaggtgggtattcgtcgtccaggaacattttcaagtggggtaggcacgcagatggatcgaatttcctcatagaccctaggaaattgggcacgattccacggtcacatagacccctgtctttgagttgggtgtaggcagtggtttcaagcacatggatgtcgagttcacagttctctggttcgtaatattgccgtgggccccttccgtgatgcttcgcatgttagtatttcggtagtcaaagctacctatgctggcttgactcaccaccttcataacacatgtctggccgcggacagtgacaagaaatattacggaatatgaagaggcaaaaatcttcttctggaagcagatctccgtgggatataggttgtcaagatttgacatgatttgatctagtcgtgcacagaggtgccaaaggaaacatgctctgagagataaggcaagtattggtgaaggaagaaaggagcgatggcaaagcaccggtcacgtataatactggtcacgtgtagtccgacctctgggcgcctgaaacagcggttgatgacctcaccgaagtgtatcgccccttgaaattcttctataaaaaatacggatacttgcgccataggggattgtatcagagactcccacatggttattcgggacccccttttggtttattcggactcctgctgtctgatctcttaggcttcaactgaccgcctaccataaaagttcaccgcttttctggccgcttttcgtacaatttactgtttatgtttgctaagcgagaaggttcgatgtttgcaatgtttgcaaagggtcaactatacgagggatctggatggcctgcggccgcccgatagtcgttgcagagcaaaacgactgattctaacttctaatgctacgtaaagtgtgatgtagaagctctggggaagataatgatggttctttctctagtctatttattctgccggttaggatattctgccaaagttagctgaccgcatagcttcttatgattttggagcccataggagaaaagacctggtcacgtgacatgcccgcgaggttatgatttaattgcttcgcttcgctccgcaataatcaggccgtttcccactttgtaacttacttcttctttctctccatcttggtatgcttctctatttacacgtgacctgacatctcacaataacttaagggcatgttttcaaaggtcgtcaatacatggctccgcatttcgtgagtcttagggctggaatctggggtcaatttccctggattttcctacagttaatcttgttacggtcgaccagtagcaaagccctttcatttgccgacctaagaggccaagacctaaacgcctgtggatctcagactaataaatttaaacaccaacttcagaaataaatgaccggactctgattattgcgctaggtaagctttagggttaaaggtatatgtggtggaaatcatctataagcctccttatatgtccgtcagctagcaataacctttcatctactcttcttcgaatttctgccacgatgtccttcccgcagcctactccgacggtaatctcgagggagcatgtggatgaagtgaaagaggctacctctctaaccccaatgggcaagggaaatggagatgacaacaatctggatgatattgcccagatattaatggaccaggaggatattgaatacccggccgagggtgagtattcaccacttttgtagtctctatcgacctaatagattagaacatcgaaagctactgcgaaatattgattggcgaattgttcccctcgctgcttgggtctgcggtctacgatttgtggacaaggtacatatgaaagagcagttcctaccatcccatggattcttatgcgatattatagtctggtcttggccgccacgacatatggtcttcgcgatgatcttcaccttgttggccaagagtactcttggtgtgtttctgtatggctccccagcttggccctctcaagacaagaccactaatgaaggtggggacagatattctattttggatacctgacagggtctttcttctctggtcgcggcctgcaatatttccacgctggaaagtttatgggtgatgccttgctatgttgtattggggccacgaatttgctttaatattggtattgaggttcattcttgggtacaacatattcatttgttggcaataaaatctgtggctgataagaccttaggcttttcgaatcatgccttattcctggactattgcttgtgtatgtcttgaacaaatctggatgggtataagatataagctaatgcactgttcttcagcacaaccatgtggttagtgggatatctggcaatatactattcatgctaatgagatgaaggtatacacaagaagagcagcttctgcggtttggtttatggactatgacaaacggtgctcttccggtgcccttcttaatcatttactatggtctgtatgccaccagatctctcttttcaaaaaatctaactttgaactgcggggcttagtcatgtcacaacaggtcccatagttagtaggttcatctttgtctttatgctttgctatagctaacgtctgcagacatcctggcggctcattttcctcatcattggtctcttgagcagtttgacaggggtgcttatgatatgtgcagtctactatttccgatgtaaagcctaatttatctagtttgttttcatgcccgatgcgccacagtctgcaaaatggctaagtgggcgagaaagggctatagctgtcaagcgcgttgcccaggcctagcttggacttaaagatagcaagccacctaggaacctgtttgatatcatgtactaatcatcttctatagctcatttcaagtgggagcaggtgcagggaacattgagagacccgcatgcgtggttgttaatcttacagatgttgttctctcagactgctgggaatgtgacaacaaacttcctcgggattgtgatcaaggtaatacccaaacgagcaccttactcattcatcaccttactgataaattaggggtttgggtacactgcactgaaggcacaattatataccacccccaactatgccattcaggtaaagagccgcctcattccatcatctaaaagttaaacactaaaacgtactctagtgaacccaaatcctattatcctcttagtatattgtattccatgtcacgattgggattcgttccttcccttttcgttccttcccgattgggatggcgagtcagttgttccttcctgaacaagtaagcgagaatagggctttgatcgcaggggtataagatccccaccgtagctctgttagaaatttaatctttctctttgcattgacttgacccgtaatactctaactgtcttctctgagcatcctcgctggtaccgatctttctgcggcacacacctcatacaatatgaactatcgcctgtgtgattacaatcctaacacggctgctcccggatcatcgaatgggtgcggagcccacacggattatggaaccttttccagtatcttccaagatggcacgcccggactggagcttgaagaaacccctggcacatgggttctcgtccccggggatgccactgttgtcttgactggttggtgtgcggttatcctaagtggtagccgggtttccgccgccaaacatcgtgtctgccgttccccgggcgtgcgtcggttgagcgctgttttgttcgtcgcccccgaccttgacgtgaaattgaagcctctgggtgattctcagccgatccgatctttctccgagaccatcatgcgtggagacctagatgttgagaccttcaaggacgttatggggaagagatggcgataccgagagggaaacgaagagatggacaatgcggactccctctcccaggataacgagattgagaacatggtgtggggctaagcttgtgatgacgtccagcattgcctaaaggtagctctgggcatttcttccagatttcatggcactttcccgggttccaggccactatttctttgtcctttcatctccatgaagctatttagaaggcatggcagaatttcatcagcagtttatcccacttgtgttggtcaataatctttctatccagacacgtagacgagatgcgtgcatcagtatctttctcttctccacttttctggtgtattggctttaaatgagtgtatattcaacggaccgcgttccaagaggaagtattgggccatgaacttccaattatgagtataaagttcgatctactctagaagtgctgttccctgcgatttcgttatttatatatatcatagtatcgataatcggatcaatattctacatatagtgcatctcaacgttatttaggtatactggacctatagtgacactaaagtgctttaggatatcggacgccactcctatcattgctaagtggttttcggtggatttatcaaagcaacatcttgtccttcccagagcttaaatgaaaagtaaacttgtcttgggtgaaatgcgtaagggacaacattatatgctacgcggttatcctcttttctacagccaattttgagtataaaatgtatataataacaggtaaaatcgcttgtcattggttgtcattaaggaaagtggttggtatacacaatattcagaccataatccgagtcatcatatcacttcattcaagggagagcagcaggggcgtagctctgatcaggcttgacaaccacaccgccagcaagctgcttgtcggtataggcaggccagataatctggcgagcctcattgacaatggagagagtagtgaagccattctcctcgccgaactggccgctccagccggaggtgacggtatattcgccgcaggtggcggggccaccgttggccctggaggcaggggcaccctccacgatgtaggtgcagggagtggcatcaccggcgccggggtagatgccaaaagtccaggtgcaggaggtgtcttcggtgtcgcagacacgcttggtgtcctggagagtccactggggggtgtcggccatcatggacttggcagaggtgtcggcgggggcagcgaaggccgaggaggcaaagaggccggtagcgaggaggagctgagtgagctgcatgataatggttggaatgttgagtttttgattggattatttagtcttgatggatgttggtgagaatgaagaggccagacagtatgggagggatggagctatttaagtactttcctccatcatctaatatcaagtttcagctcattgcagatgactctgaaccctttcgtcaagctcgaaatagaactatagggatacatgaatgtaacgtcgagtcaggtaacacccgtggacccgaaatacgttgctccacaacagtagaagtgagacagccctgctagctatgatttgatttgtgcattcctctctatgaccttgtttgtttctcgacatggttgccaacataagttccgtttttatctaagacatcgtcaaaacccaacgaatcagatatttctacagctgcaggttcaccccgcaaatatggtcagaccagctgtcgatcaccagtcgatgactctgtgtcatattctcttatacgaagcaataatgaatgctgtatgatctgatttccgaaggtaactatgtattctggaccctgtaaccccggttacgccacgatttccacgccacccttaggaaccttggaatggcgttgcggaaaaatgatagaagtgggccaaggatattgttgattggtgagaacattgcctaagtggacatctttgatgaatagccgacataccgccttcccggtccgcattccatatccggacaatagaactgtatatagatacatttatacattaatagatcatgataactcaatgttgaggaaaagaacccagttaggctccgttctggatggttgggacctaaatccaacagttcacctgatgaccactttttttttgtctcgccacatatcagtcgccaagtctttcgtggccgcttacgggagattgcagacgatctttcaatttatcactcagtaggcgttggaaaatgaaaggatcgagtgatccggggccgcagtaaacaccgattcgctgatccttccccccactcattcgtattctgtattgtaggtaggctgtaggtaggccccttacgccaggagcttttcgcttgtccctcagacagagatctgcgtttaatggtgttgtgctggctacggagtactgcttgccttaaatgagctttgaggctgtgagggttcgcctttttcttgcttgtcagatcgcaagccttctccaagggttgatttcacatgacgtaccacgttaggcgagccatggtccattgccactgtctcttcccagacatcagtcaatccccacatcgaactaaattgtccgctgcagatcgaacaggtggtagagatcgttgctgggcgtggtggagccgggttttaccgtggcggtgacgtcggaatgtacagcgcaatttccaggctaggaaggcggtatattttctatttataaaccgaggaggcagtattctcaccactaggaactatgtatgtgtcctcgtccgatgaatatcctttagcctccgacctctatcaatagttaacacttcataccgcttatgtgcccttggcgaatatactgtcccatggtttaccaatatatgggctgagccgggggtcagcaatctcacaatgccatatctgtaatctcggtccaaggaacgccctccgacggatgttccaagcacaaacaaatttgcgtcgatccagggatcctcttaaataaattatatggtgacatggggtagtaggtgatccgttaacacgtcctgctgcaatgttcgccttggaaatgaacacgaagctcgttgcggtgggatagggctcgttggaatatagtgttacagtcgacctcggtttcattgaggcccttcaaatctaagtgcgccttgaacgtcctcagctggaaagtcccaaggcaggcagccacttctctactcagaagtatacatgaaatcagcccgtagagtgtacttgaaatctctaaacacatcatccccaccatggaataagtgtctttgaaagatgatgacagacaccgtctttggaaatatccgaacgaattccctcgagttcatctcagccgtaaacgacgttgcaccactcagaagagtatcagtcgtaacagaagaccccacaactgaagcacagctcctgtcaccaactggacccttctcagattcaacatcagcaagaccaatctgccacttctttgcaaataacattactcttcttcgcccacccaatatgaggctgcaactcctccatatcctattcctcatcccatctaaataaattgtgaatattataaagcgacttctccagctcatcaggcggaacaaagcactcatcccaatgaggccggaactaatccccaccctcataacgcaggaactgaagacgcgcattcagttgacagagacggagcatttctgccgttgtcactattgtggtcttgaaagccggaaatttaaaagggtttgtttgtgttatggctgggcttcttataccccgctttttgaggctctgcccgggaatactgcctgcagcttggtcgaaggattatggttagctcagctgtcctatcgtcattctatatagcaaagattttttggagcagttgctaacgatgaagtagttgatgtgataaaagtgacttgttttgttagtggtttatatacaaattgtaggtaactatctaccgtcttgctagggagttcgttcgacactgaggcggtgtggagggcggtaagatgggtagcgaaaaatcaggcagggtgtaagggccccgatgataacgttgtgtaagaccgtttaccaaaggtcaaagacacagatagtctgatgaatctgtaattcaaggcaactactgataatcaaataatttctatactgaattaccgttatcaaagatgcaaaggaaatgaagttagaagatccctaaaaataagattatgtaagtatgacatccgccacatgtggcacaagggattgtggctagagatttcttgattggttcacggcccatctcatctctcacatcctctcatcctccattatttggagccgacaaaatatcattatctctgatccgcctcaaagcacactcttttatttagcgctggacatttttatttctcgctatataacagcaacacaaagtgatctcatcgcccacaaaacaatcattgcgataacctcttgtctttcacattttgattatccacttcgaagctcaagtgcctattcaaaaatatctatatataactaatctcctgaagccgaaagttgcgtatttttgggttgagtttgactattggaacagtccctcgcaaaaagccatgtcaaccgccccgtccatggctgctaccaatcagaactccacccaagagccagcaaccagcaacagcgggacttcacagatggagtcagagatccagcttgtttcatcactagccaaactacaagaactcgaacgcaaggtaagtacacgagcccttacagctctgccacagagccaagttaatgagatatccagatccatgaactgcgtggattcatgccccagggcctactagagcctctagtgcctattgcaaacccagataaagtgtcactcggcaatccaatcgctgaaacgccacggatcctccgggctagtctagatgaaaccgcacgcgcacgcgttgctgatgtccagcaatttcagtccttgtggagggatccggaattggccttcgtctgggcccatgttgaatcacgcatcagggaagccaacggccagctcttgcagccaacagggaagtgggaaagagattacgacgttcttctagaagaactagcacgaaaagaaaagtcgaaagtagatgagcgtcagcgagaggacgaagaggctgaacgtatcaaagcgcagtctaccgagggcgagtggaagaatgtcttggagcggtttgttcagcgcgatattcccggtatacgggttatcaagagccaggatgggacttctctagcggtagcacttgttagagctggtgttgtcttccagatcaaagggatatcttttcctggctccccagtctctgactgggaggtttcgagtaatatcgctggtcggtcacccacgaaacttgagaatgctatactggaatgtgtggggtcacgcccgcggaaatgggaccttgctttcttgctggtatgttctattcctgacaccgaaggagattcttgctaataccgatgcaggacatgatctcttcctatgcggatatcaagcagacgccatgcgtgaagtgcaatcgcctggctgataacggcgcccaactgccaactctccgtcgccctcgggcgaatgaacagtctttcaatgggccagcgcgtatatatacctttgacgcattgcactccggatgcgcctgattgaacggttcatggggcctgaatggacgatgaatatctcttaacccattcttgggtcacagagggaatttttggaagaccatcggctcagtgggctatatccatctcatcttggtcttgacggagaaattgattggaagcattcgagcgatctatctggatttaacagaataccatgcaaaccaccctcccaatacccctgattcctttctccccttcctattcattggccttaatctgcatgcttcccatgaatattgtcatgccaaaattccgctggatactcagtcccattttgatcccagtatcgcctcggaatacaatgaacttcctccttcccggtccatcccccccttcgagcccttctcccattgcaatactcaacagcactccacgtcccatggtccggggtatggtacttcctcgtgcggaaatcatagcggtcgcccgcgggccgccgtgcccaggggagcgggctgtagttcttgtcagggtcgttggggttgctctcccatcgggaccattcttgtcttgtgggctctgaccggggttgagaggatgactttctggtcttggctttgggttggccgattcggcccacgtagatgtctggccctttgcctgataggacatcaaagaagcgccagcggcgtggccagtgttgtgggttgccggggcgtggatctttaggccagatccaacctagttgggagggcattgtttgtttgtttttggctctggatacttatcggtgatagttgggagtgaatgttggatgtggaagacttaggacagatgaaataggtaggtattagtttcatggattggagaaagggcagaaggagattaaatagcctcctttattttctaagctttcatctcagtcaatgaaccgcttgaatgacttcctacagctttttttatctgtaagacactccaatttccaattgtatgaagtaagacatcaagctgttcgtttgtctttgcgcaatgattggaacaattgcatgggaggtgggactgaacgcctcagctcacaataaagggaatatcacggctgcgcgcatggcagattttatatttccggtaggcaaaaaaggatgatctagacgatcaccatagagtacatgtatgtatttattcttttgattggggctatagtatatacacccctgtgtagccaggtcattcggccatagatctataaatgaatcttacagacaacggctaagcaacacagcgactaagtaaatcttaaatattaaacattatgtcattcatgtttcagaactgtctcgatcttgactttttgatttcattgatctaaagccttaaacatcaatatcattgcatcaagtgactctccaccaaagaaagaaccctgacacaagtttctatcaagttaccgtgcaagttctccagcaaggccatggaaatcatgagccagtcacttcccgcaaaaacataatcttcaaggtggacgaagcagacaaggcccatccccactacactggctatctgcaacgcatagcctcccatggaggcgatgtccaccaaaaaagacaatctctacaagagggctctagatcatgacttcatggggtgaaatgtgttgatagtaccccagtgagagacttgctgtgcccggaacgggatttagatcgcagtgaaaccgagggagaactcagggtatctggaatcaaggatcgaaaatgcgatgcaacggatgttggattttgtgagaaaccgaaaatacaaaaaaatcaaatccccaattgaccatctccccttattattaacaaaaatagaaccaatagataagagaaaggatgagatgcagaaagtgtacaaagataaatataaaaaaaaatgacggaacgccgcttccttgctattatcgtaaattcagatcgcttcaacaatgcaacgccccaaaatggaaaaatatgttcatggtcagtcaattcgagtgcaccgagtgggtgcccttcaagtggtcaggacaccagcactgcccgcaaaccaggtgaacgaagcgaaggtgatcacggccatgccgacggtgaatttgatagcgagacgactggtttcggacagagcgccgctgcaggtggcgcacttgaattctagacaaaggttagcagtctgtttgagcgaggatggttggtataaaaaattcaccattgagtggggtgtaagactggggtgtgtacatcccgaagatgtaaccaccattctgcgagctcaagtatccggcactcgcggtgtcgctaattttcttgctggcatcgtagatgatcagagtatacgatgcggtaagcaacggaatagtagccgatgactgatattttccagtatcccacacaaggcttccggtttgctttacgctcatgttggagctgagcgtatatgtcatcgagttgagactgcacgaagccacgacgttgaccgcagacggcgtgaccgacaaagaagtatagttccatacaaatgtcacatcctggccgatcttgtagtaggtcgtggacgaagaagcgggagtgatcatggacacgccgccagcagcggcagctgggtcaatggagatggaggtggtagtggtagtcttggattttcccgtcttcgtgccagttgttgtgccggtcgtatcagaatcggttgcagtgcctgttgtcttgcctgtttttgtgtctgtacttgtgtcgctgtttgtgtcggtgtttgtgccggtggtagttccggtggtggttccggtagaagtcttggagacagtggaggcatccgtggtagattcggaggtttcagcggtcgttgtctctgtggtatctgaattgcaggtcagcatcaagggcaatggtgtgataagagtcctgaattacctgctcgcttatccaaggagttacccgggagttctccatagggccgccatggccaagccgatgagatcgttcccagcaacaagatggtgcagaacacactcaaaataaaacaccgcatgtcgaagttttggagagattatctggaagttcaaaaatcaagcgaccgaggtattactccctgggctgaaaggtagactgatcacgccccttgcacaacccggtgtgaattgtcaaaaaaaaaaacacagaggcctcctatgtcgaaacaggcttatcgatttgatgtccgtaccaagcaatttcggttgctagggaaggacgatcaaaaggatgtgcagtgcagaatatgttattaatccccttgccagtctgggcactaaaacatgtagatctcgggagtgtggggtttcgactcggagcaacgatggtaaataatttcaaggcaaatagtaaacgactgtctttaccttcacagacaattggagagagggaagaaaacagagagaaagagaagatgcgatgtttgagctgtattgaggagctaagcccaaataggtagtggctgtccagcatgtgagacatgggctatttatagcggacaactgataactatctggactatgtatttggactatttggactatctagaataccaaattcattgtgctataaagctgagaagtgtcaagtctaagtttatactcgttcaggttgagcaacgcaaaagttcgactttatcagacacaagattgcttatatatctatcacattatgagcatgtaaatcatatgagcaccgatcatttattcttatcctttaattgatcaaatccatctcacactgaaacagaggggtctgcaatatatatgtttcaattcaggatatgtatgagtgataaccatgtacttcaacgaaaaccttcgaactgatattcaattaatcacctatcccagaagttgaccaacatccgactatcattccagggctacaaaacccagataagtgaatgatgaatggcagtgcaccatgacatagcatagttgcacaacacaacaaaccacagccctactctgtactatgaaccggaaccgatgtttgacgccagccatggagtaaactgtcatacctacataaaacagcgaccaactatactatactaaagggtatgatctacaatcgccacctggctgcccgtatccaaggtcgggtatcgctcggttccgccagagaagtttcctaaacgtgggggtggcgatgtagcaactcgcacccgaagactattacgaatttagggatgggatggggaagattgaaagatgtggggatctatgatattctctctcattgaaagactatatggcattggtgaggatccctatgtcgggagaagaattctacatattcgatatagagcattcacaggacatccatggatgttaagaagataacgagtagaataatcaagatattatcaattaagcctgccttatacgctgagatatgctgacatgaaaaaccaggacaagttccaaattttgaaaagaacacaaaaactagaaagcacatatcacaatctgatgttcgctacgagttgtaaaccaaaatccaaaagtctcaaaaccctctaagcagagctggtgggaatagcattgagctggatcctgtcacatccttccggaagtgcaggttcctgaacagtcttgctgaggaagtgcaagttggggaacaactggccggcctcgaaattggtggggcaccctgaaaaaaaaaggagtcagccattgcactcaacacgatcatgtagccttggaaaggggtataaaaatagaagaacttacacagccatccatcccagatctcactgggtccctgaacgccctggcggctgatagagaagcctcccgagccggaagtgggtttgacgctgatctgggcgcgccccttgcgagtgcctatatagtaccaatatcgttagtgatctgggctcggtaacagtcacattcaaaggtaggacagggctaagcttaccttccacgctgatcaggtcaagagtccaaggggacttggcctcggtatccaagataatggtgccattgatgaaggagaaggcggcagcgttgctagccgaggcaccagagaagacggcttcgctgttaagcgggtcgctggccaacccgtggccgacggagaggtacaggtcgttgtgagagctgttgctggaaccggaagtcctgaggttgaagagcttttgggatggggcggcggccacagcggtggctaggagagcgacggtggcgaagaacttcattttagatgatgagtgaagaattgggttgggaatgctttcaagttaatggttccttgaggggtttcggttgtttttatatgtttctttcaagagaggggtaggattttgacggggaagtgacgcatttatatgctttgggatatccatgggagactgtcgatgaacatgctccacaggtggagtgtagggccatcggactgtttcgagtgtcgaacgctgatccggatcctccgtatagagtagatatccttgaaatcaaaatagaagccgtcatcggtaaagcaggtagaactgtcgattgattgttcttcgacctcctttgactctataccctggcaatgttgctcatttcttcttctctttgtttttcttcgcagcatgcaaacatcactgcggttgtagtattttccttgatccatgctgccgtatcagaacctgtgtgtatagggtaaacgaaaggactaacccaccggatactaattacaatcgacatgctggaggtcattaagtgggtacctgactagctacaccatctaagccagtcatgatggtgatcgaatgcagatctcacccactggtgtgtcttctatccatcaattgaggcacctgaaacaaaggttggtggtattaatgatgtgattttgcccctatgattgggtcacacaatgatatatgtaggcgtaggatgaattttgtttcacaaatgatttcactaaaagaaaacccatcaagaatcataccagaatccccttgccaccgaagtaatccataaaagaagtcgacaaacaacgaacgccaagatcccgtggagcctttcccctgaatcctgtctgacttgtttaatatcgggctgcgactctacttcgtacaaacgaaaatctcttgcctatttggctcgatatgccctcgcttctatgtttttcgcatcattgataatttgtggtcccactagaaatagaatatggtccactgaaagcagtgaagttgagggctgttacatagttttggaaatattattagaatacccaacccctttctctttggtaggttacgtgcttacgattgacatgttgtttgatacttggcgtacatcatggaaggtgtgtatgaacgcatgtggcttgagttaaacggcagcttgcccctatgcgtgtaggaaccccttagtagcgtcacactaggcgttttaagcatgcgcctagtgggtactgcctatgtcgtatgccgtgatgtacattttgactgtgtaactgtataactagggggtatggcattgtctcattgtcattcattatctcgtgaaactcactatcgtacagaaagatagcctgttcgatttctgcccggggacgatctcagcccaccggctttttttccaagcccctcatcgtccccgattgctggcgttccgggcaaattcaggctttagagtccaccgacctcgacgatcacgaccatgctcaagtgtcgcaaccttcttcaatgactcctggaactcagcaacacgctgcggattggagcagtaatgattgaaatggtgaacaatcgactgcgacagagttggcccacgctgagaggcaaggtagtcacggatcaagggcatgaattctttgccgcgtggcatacgtgctgatggactatcagaaccacttgttctctgtccagcagccgcggcagcagcaggattgagtctagccaacaggtctgaagatgatggtcctgccccagcagggcgagccgagctaccaccagtccgtggatcttcgcggcctcccatcccaaaacggcctgtccaggtaggaagtccgatggggagtgcccgggcagtttcttcggctttgcggagctcttcggcggcttcgttggcgacgcggcgagcttcggcttcgatcatcttagggtctgcgcgaaggactcgtttaccgtttacgatctggtcgtgctgaacggcagagtgaacgccagaacgagcgaatataccatgcattatgcgatcttcggaagttttggcattattgtcctcttcggcggcgttctggaactcttcgacattggcaataccattaatgtcggtgataccgtcctcctccttgagagtcggcgcaggcttactcttgctgccatgagcttctttagcctcttcctggtatgtgacttcagcgttcttgaagagtttggtggtttccaactcgtcatcattttcatctgtaagagtgaacagatcatacagatcactcagctggaaaccttctctttgatgaggatcacgggtgattttattggtcaaaaattgtttgaatatttggcggtggtagattttctcttcgatagtgcccttggtcatcaagcggaaaatggtgacatcacgcttttggcccagacgccatgcgcgctctcgcgcctgcaagtcagtcgatgggttccagtcgggatcgtaaataatgacacggtcagcacctgtcaaattcactccgatcccgccgacacgggtggtgagtaagaatacgtggatattagggtcgttgttgaatgtgtcaaccagattctggcgctccttgatcggagtagttccgtccattcggaggtaattaaatccaccgagcgctccaaggaatttctcaatgatgtctagcatcagacggccctgggtaaaaaccagggtcttgtgaccagtatctctccacacctcaagcaaacccttcaaaaccttcatcttgccagaccgctctgcatcaccgtaatccgcgtcgcgagagcgcaatgtgtggtctgccaagtctggatggttgcttatcttgcgcagtatgtcaatgccaaacagagagtttcttttccctcgtatgatagacttcatgtcatccgagcccaggaacctcttgtatatggttcgctggagttgggtcaatttgcagaaaatgacctgttcgcttttcatcggcagatcagatgtcacatcagccttgaaccgctggagcagataaggactgatggcatctttgagagtttctgcacatttcgcagcagtctgcacttgaaggtttgatgcagatgcgtagccaccctgacggatggggatctcgaactggtttttgaatgtaacaaggtttcctaggcgcattggaaacacaaagtcaaatagggaccaaagatctaccagactattctgcatcggggtccccgaaagaatgatgcgatgtggagtccggagttccttgcagctgaaggtgataccggcatctggattgcggattttatgaccttcgtcaaggatggcgcagccccattcaacgtcaacaagagcatctgcataagactgcagacctgagtatgtagtcacgaggacatggccctcctccgtgacacgcttaatgatctttttagccgctttctgaccggcagataggtgccgagagctgcggctgctcatcatttctgatgaaagcgcattttcccgactgctttccttaccaagatttatcatcccgctgcccgatgagtgtaggatggagacacggaagggtggccaccagcggtgaaactcattaacccattgtttcataagagttgcagggcaaacaacgatggcaggtttggtgagtttattgctatgatgcagtgccgcaagataagaaatcgcctggatggtttttcccaaccccatttcgtctccgataattccaccaacagtctgttggtgcaactcccaaagccactggactccagttttctggtagggaaagaggaagcggctgatgtctccagggacacgcagtccattgtcaagttccatggccggttcggtgggatgtggcttaagccactcctcttcttcattcaggtcagcgtcgacatgatggctgtcagcgtgccgccgggcagagcttcgccgactgatccattcctggacgcgagactggtatatcgcctcgtttccatcatcaaccccactcaaatcttccagctcaatggtcgcttttccttgcttgcgcttgcgacttggcttggtctcaggaagagtatcaggcatgaactcttcaccctcggatgtagcgtcaccatcagaggcaacgtaacttgccgacgaatctgctcccagggagctacgacgatccaccttcttccgcttgctcttgctttcgctgctcgcgtcaaagtctaagtctgggagtgcaaggtcccggtgggacacggctgggtgatgtttggcttgttcgcgctcctcctcctcctcatgctgttggtcctcggcatcgacaagtgcatcgtgaagattaccaagtggcccatctctggagccctcctgcatcaatgcgaagggagtgatctttccagtcctcaggagatactcgcggcgggactcattcggctgtcgcccagacccgtgcgccaccgtcgagttgccctgcgactcacgcctctcgtcaatgcgctgttggatgtccttcaagtcttttcctagatcggccttgcgcatctgcagccttttcagctcattctcaactcgatggcgagtagcggctccgacgggctgtgtcaggcgttgctgggcttggcggacctgcgaatcgacccgtctgcagattaagttagtcacgctatcaaatatcaagtcatgcgctcttactcccgatccacgagggttttctcaagtcgcttgatgtcattctcctccgctttatctgccagagctttatcggcctgaaaaaaggaaagggtgagccagagtgatagtcaattgagacctgcctgggtcatacctggcgagtgatatctctttcgaggtcatcctggtcgcggacgtctgcttggagatcacgcagacgactcgcctcctcgttcgtggacattgtgaaagttgtccaaataaagattgcattaagtgaaaagaagtgagagactaaaagactttgtctagagtaagggataacatggtgattgctcaaagagcaaacacaatagtacaatagcacaggtagcaaaaagtctagatgaataacacaatctagatccatcagagcaatggcacaatcagccaccgcctatgataagcaccgctcacgtgagtgaatgactcattgaaagcttaggtaattctcatttcaggccccggggtctggaccggtagttaccacttctgttctcacctcgatttcacgtcttggtcagtccaacaacttcgttctttttacccgtggatctctcaaaccttgaaatgtacaaatatgttcacggacatcacagtgtgagaaacctcggatgaaaaagtccttgatggcatacagaattcgaggtgatgaaagcctagagcgagcacatcatcaggcctaacacgttgggataacacatatcgatccatatcatgcacgagcactagcctcacaaaattgttcgtatctggtgatctgaaagcaagaagacggttgctctcctcaaagtacgagagtagggcatcaagccaagaaaagagattcgatcttaggagtgtactacatatttgccagataatccgcaatggctgaaaatcaccatgcctaagagtacttttcttgattaattatctctatattcagaataccataccattattccaataagatgatcaatcccaagttgtgggctcccggcttaactaggaagtgacgtcccatgcctctccaattatatgataccatcaagaagataccccgttattaggtcattcaatattagtagttagttagtaaatccgttcagcctgatgagattacagccacttaataactcgaaagagacgctctgacagttgggcatgcaaatggagcgtcgatcatgtgaaaccagtaatcgccagggagaccacaatccagtactccgttcaaatgtcgagactttagcatcatggtcttgaatatatatgtgcatattgtataccaaaagatagaataccccttcaatatgccctcgtacagaggaaagaaatgacatactatatagactcagatctagcgggcaaagttcacctccacttcgttggaactcatctttccccctcttcttgatctctggctatatactagtaatatctctatgcttcgataaaagccattgtttaacatagtttttgttgatgctagctgtgtctttacagagatttccccttttcacgggggcccaagacaagtccattgacttggctaacccccccagccgcctacgtctactgcgtcgcaaccaaattgcgaccgccccccctctctccctttcaaaacttgtcttcaccaacaatttctcggatgatgaagcatagcacgacctcattttaacgccaattccctacttttcattctctattcgtcgaattccgtcaagactcgcctcgaacgtgcgatcgcattacgagtgccgactccgctggcatcccacggaccctgatcgcagtgcttgagaacacggaccccgaatccatttgttggcccaaaaagagggcttgcacaaaatggatcctgggtggcagccttatcaagatcctttaatgggccaccctgcgcagttcaatactgcgttggcatctcatccccagcaattagcctcgaaatacggtcagccaccacagtcacagccgcccgtcggatacacgtacgaaacattccagacccccgtcacgacatctaaagccccctcggctggctcaaattccaaaactgtctccatggcgtcctcccccactgccacgccacgtactcgggattatgtcaccgacgcggatactaccatggaggacgctgacccgtacaaccgggcaaagtacccctcgaggccaaaccacaatcgcgcctcgtcacaattcttgaatcaagcagaagaatcatcggctgcccgcagatactctccggggaatgttctttcgccgccgatgtcatatcccactagtcctggcaagtcccaaggctcctatggatttccatccgcgcctcagaatgcttcccgtcggtcccccgcgagaccagaatatgcatcaccaccacaaggatatcaatcgccgccatgtgagttcgatctcggtctcttgttcggccatgtcccgtttgctaatatctcgacagccaaccggcccccaagactccctccccttcaatccggcgacctcagcccagaccagtactacccaccatccgcatcttcccacatgagtccaggttttggtccaggggcgcgatctccgcgatctggctcgctgccatctcaggctcctctagtgcccggtcgcggtccagttcccaagttccaaaagattcagtctgtccaagaactgaagccgcgcatgaatatacagcccgcctatcggcgcgccaatccagagggtggatttatcagtgtgagtgctccgcaaacctcactttcttgtcgcgttggctaacccgtccagccacttcaatcgttgacaacccacctcccggccacttaccgcatatgcaaccctggctttaactatgagtcttcgagaaacccgcgacgggtattgaccaaacccagcaaaggggtcaagaatgatgggtatgacaacgaggatagtgattatatcctttatgtcaacgatatccttggaagcgaggaagccggtcacaagtatgcccccgatttcccgataatagccgaaccctgggctgacagttgtttctccttctgatttagaaatcgatacctcattctcgacgttctaggtcaaggtaccttcggccaagtcgtgaaatgccaaaacttgaaatcgggagaagtagtggctgtcaaagtcatcaagaacaagactgcctacttcaaccagagtatgatggaagtttctgtgttggatctcgtatgtcatattcccccaacccctatcgttcggatctccgctgattacccgcagctcaacagcaaatatgacaagaacgacgaccaccacctgcttcgtctcaaggatacattcatccaccgtcagcatttgtgtctcgcattcgaattattgagtgtgaatctttacgagctgattaaacaaaaccaattccgtggattgagcactacccttgtccgggtgtttgcccagcaactgctgaatgccttgagcttgttgaacaaggcgcatctgattcactgtgatttgaagccggagaatattctcctgaaaaagtcagtatcgcctgtgagctttcagggtcagtttctaactgttcacagcctcgagagcccgatcatcaaggtcattgactttggttctgcatgcgatgaacgccagactgtctacacctacattcaatcgcgattttaccgttccccagaagtactattaggtttgccgtacgtacactggtctcacatgttttgttccttattaatttgttcctagctactcatctgccattgacatgtggtcccttgggtgtatcgtggtggagctcttcctgggtctccccctgttccccggctcttcggaatacaatcaagtttgtcggatcgtcgagatgatgggtatcccaccaacatggatgctggagatgggcaagcagtcgggagagtttttcgaaaagacacaggacgagttcggaagaaagacgtaccgcctcaagagcctggagcagtattcccgagaacacaacacgaaggaacaaccgagcaagaagtatttctcagcctcaacgctggaggaaattatccggagttacccaatgcctcggaagaacatgaagcaagcagaggttgatcgaggtaagtttcccttttccactttcaccctgagactttctaatcatcgcagaactgaataaccggattgcatttatcgactttgtacggggactcctgtcaatcaatcctctcgagcgatggtcaccccaacaagccaagctgcacccgttcatcacccagcagaagttcacggggcctttcatgcccccaatgaacctcaagtattcgacggccactaaaccggcaccgggagttcaacagcaacagcaggccgaagctgctagcaaacaaagagcagctcaggcggcgcatgcgcaaaatgcctatgccgtgcagatgaaccaatttcatactccacctcagccccaaccccagccccagcctcaagccccgcccatgtacaatggcatgtacccacaaggcgcgccgcctcctccataccctacccagcagtcccctggctacggtcatcaaatgggaatgatgccaggcaaccaggtacctcctcaaagtctatacgcacaggcgaccacgcgagcaggccgccaacgagcatccaccatggaccccaacggaggaattcccactaccatccaacgagtcgctagccacctggatcccaacgcgccaattcgattgcagcccagccctgcgtattatccacctcctcctgacgggtacgtcgatgctaatgccagtcaacggcgtcgtgggagccgagcgggtaatgcgaatggaaaccaacgcaatcgggattttattcgcacccttgaagatggtgtgcttagcgaaggatacatgggtcagaaccaatggcactagggaattggggcaaaagggcaattcccgtgcccagcgttctctacgactcgggagcaggcatactgatatattttgttcacgggtgtcaatgacctccaaggcactgcatttgtaagccttgctctgctgacccattccttgccagccgattcgttcttatatggctggctcttgtaggtatgagtcaagaaaaataccccttcagtgggttaacgtggtctacaatgatctggaccgctgatacacgatctgcattgctacctagcgctagatcgattcgcacgcttacttgccgtgagctgtgcccatcagtggccaaatcattcgccgcgagatatcactccccgcatcgtcatcactatttcattgcgtttcagtacgtttcgttacgtttcttgccctgttacgattccaattacgtttctccgatttctttaggcagtgcttcggcatgtctgtctgccttttcgtgaattttctctttcagcatagcctggatggagcatgaaagaacgatctcatccatttctttttcttctctcctcgtaactgtttcacttaatttgcaatcttcctagggatgctgatctatcctttttttctttcttttggtcgaggtaagcctctcggtcgcatgtcatggcatgtcgtttctttcgggaggttccttgttttatttactgcatgcagtaaatagtagagttaatagtcagacgataaatgggacaaacgttacgggttgatgagtgtatcattttgcccatattcactagtcaagaaacttctttgcctgcgcctgcctgatcggtcaggccttgattcccggatgagaggcggtttcccaagtacaagcagataaaagtttcctagacttctttttcggatgattcgtactcttttgaaagtcagcggatagtcgaatagtcaaaacaagcaagcagaagcaagtcgaaggaatagaagaagtataaaaaaggccgtcactatttctttgttatgcgctatacctaatctagtttagtcagcccctcgcttaaatttcgtgtgtggctctcaactgcgggaacttcgactttgtatcgccgacgacctgattttctagctttaggatcgccacttccttttaacgaaaccgcaatccgcaaacatggcgtcgcgtttcttctacggcagcggcagcgacagcgacagctcgtctgatgaggaggaggaggtctaccgttccggctccggcagcgaggaagattctgaccaggatgactccgactccggctccagcagcgacagcgacgaagagggcgaggagggccgcaccggtgcctccaagttcttgcacgatgactccgaaagcgaggagagcgaggaggaggagaaggttacaatcgttaagtccgctaaggacaagcgtctcgagggccttgagagcaccatccgcctgattgataacgccgagaagatcaacgactgggctgttatcgccactggtgagtctatacgctgcctgggaggagtgaagagccagccaaattggacgaccccaagaaattgcatgaactgacatgattcccaaacagagttcgacaacctgaaccgccagatgttgaaggttaccggtcccacccccaaggtctacatccaagccgttgccgaactcgaagacttcaccaacgagaccgcttccaagcagaaggcctcgaataagaagatgaacgctagcaacagcaagggcttcaacgcggtcaagcagaagattaagaagaacaacaaggaatacgccaccctcgtcgagaagtaccgcgctggtaaggaagccttcatggcagatgaggtcgaggagaagcccgcccctgctcctgcccccaagcccaccaaggtcgagaggatcgagaacttcgctgccgccgtcgctgcaggtggtgaggatgatggattcgctactgtcggacgtggtggaaagaccctccagtacacccctgagagcatcctcaagcacctccgtgtcattgttgagtcccgcggaaagaagaacaccgaccgtgccgaccagatccgcaccatgcagaagctcctcgaggttgccactactccttaccagcgcatccgcacctacatgaccctgatctccacccgcttcgatcttactgccacatccaccgccacctacatgtcaagtgagcaatggcaggccgcaaacgaggaatactccgctctcctttccgtgttggaagaaaatcgccaattccttgtcagcgaagccgccgatgagtgggaggacgacgagaagcaacctactgttgccgagggtgaaaccttcttcattcccggttccgttgtatcacttgtggagcacctcgacgacagcctcacaaagggtctccgcgagattgaccctcacacctcagagtacattgagcgtctgacggacgagcaggcactttactcctcgcttgttcgctcgcagctttacgttgaaagcctcaagggtgccgataagaatggccaggacagcatgaacagactggttatcagacggttggagcacatttacttcaagcctgctaatgtcattgcgattgtcgagcaagcgaaggacaaggcagttctcacaaatattgagtcagcagttactgctacctataaatctggggatgtccagagcctcgtggcctctatctgcaactacatgttcgaacacagtgatggcattccccgcgctcgcgccatgctctgccaaatttacttccttgctctacacgaccactactacaagtctcgtgacttgatgctcatgtctcacctgactgaaaacatcgccactttcgatgtcagcacccagatccttttcaaccgcacccttgttcagattggtctctgtgccttccgtgctggactcatctacgaggcccagaacacccttggtgagatctgtggtagcggccgccaaaaggaacttctcgcccagggtatcatcatgcagcgttactccactgtctcgcccgagcaggagcgtctggaacgccagcgccagctgcccttccacatgcacatcaacctcgagttgctcgagtgcgtttacctcaccagcagtgctttgcttgaggtgcccctgatggctcaaacctcatctgcccccgagctgcgccgccgcatgatctccaagaccttccgccgtatgttggactacaatgagcgccaggtcttcaccggtccccccgagaacacccgtgacggtgttattgccggagccaaggctcttgccgctggcgactggaagctttctgcctctacattcgccgcgatcaagatttgggacctcatgccccagcccgagttgatcaaggccatgctgtcccgccagacccaagaggagggtctgcgcacctacctcttcacctacgccccctactacgacagcctctccatctcttctctggccaccatgttcgaacttgagcccaagaagattatctccattatctcccgcatgatctcgcacgaagagcttgccgctgctctcgaccaggtcaacgacgccatcatcttccgcaagggcgtcgagctctcccgtctccagtcccagattgtcaccctagccgacaagtccactaaccttctcgagtctaacgagaagaccctcgagcagcgcacccagggtatggccaacgccttccaacgcgaacacggtcccggtgcccgtggcggccgcggtggtcgcggtcgtggtggtggtcgtggcggtgcccggattccccagggcgatcgccgacccggtggacagcagtttggtggtggtgcattgggcgcagcgatcaaggcttagattctgatgtaatggcatgttctttctcttttttcccccctttcttcatgttttccttttttactcctgtcatccccttcgtgttggtacgaccgttcctttttttttaggccggaaaaattgccccgtttctgcgctttttttgtgattgatctacatgatattcacgtatggaaatgatcgagaaagaatcaaggtgcatactggttagaaattgacggcttatggattagttcttagttttggtgtgtgcggtgtttgtagagttatatatgtactgtaggaagtattcgagcctcctcatagatcgtaccttcgaacgtacaagtgggcttctcagagatgaaacctggcggcttctttgtcactggttctttcacaccactaacatctcaaatgctttgaattggaacaaaattccggatttgtcactcttcgcccgttgtttgtaagtctctctagcgtgtttgaacgaccatactttcctcgagccatttcacaagctgtcgacaatatccttccttgaggtaccattttctcggatgctgatcaaggcgccatttcacaatggagttggcgagcgagaagctcgaaagggccacgctacatcagactggaactataccactggtcatctattacgctttgcttctttgccctgctgtgctttgacaaaaatgcccggtccttttgacatcttctttgattcgagccttcaatcttggacgtataaggtacatcaagatgacacaaagaaccttgaagcaacaccaggggctgaattgcggagtgaacacatttcaacctcaagtcacttcgattgatgagctacaatcccgaggtcccagggttactctgtcgaattcattgttgtcgagcacatgagcttcttgaaagatccaaaaatagcaccttcccctcgatcagtttgtctctatccacacaagattaccttcctctaatccctcattccaatttgtcgttttctttgtcttgtaaaattccacaggatggttactacaaatatcttctctatatcccacatctcaatgcttcttcttcatcccaagttgccaggccctctcctgcagtgctgcaaagtccatctcctttttcttcaagatgccccctcgtcgtagtacgaagcgggcgtactcaaagccccccttggaccctgaggaatctccgaagaaacgcaaatcgaccaacggtaaaagggagatttcttccccttcctctgatttttcatcagacgaaattgaaagtcaattgcccctcttgccagaggactacgactaccttgactacagcatgatgtctcaaagtgtccaggatgaagcgtattcacgccctccgagacaacagcgatggaaacacaatggggccaaacctattaccgatccagcgcttgtcccggaaggttggaatgcggacgaactagatcttgatgtcaatgatatcgatagtcaagttgagagatgtatggagaggatcagtgagggaatcttgccgggtttcttcaagttcagactctcacaatatgagaaaagaagggctgctcgcgatgaaatggtccattctgagccagccggactcagcttggatatcgttcgacgcctgggccatttgaaggctatcgagacacatctcaccacgaatgaggacccggataatcagcttcccaatgtcaaggctctcatcaaagcttacagggaaggaaaattgggctggtcgagaggatgggtgagctactggtggaagggcatgcagctcaatgcgccccataagtttgacgtcgatgttcataagaacatggctgagcagtacgacaacactaaggcgtggtgggtggaaggtgtaagttgatcatcactacatacatacgaacattattcttgattctgacttgagatgtcaaatacagcttcaacctccaggcggtggcagtctaggaggttttcactcgtttgcaccgtatactaatgtccacacaattcaggtatagtgtctatttggtctctcagcttattatttcttctttctaactttcatctcttgcctttcatatagttcccggtgcatatatcggctgatagtcaacttcctggtgctagtggcctcaccctatacgtgtgccatgatactggtgccgatattatggcgatacctcaatgctatatagaccagctggagtcgctaggtatccccgttccagttcacggctataatattatggaaacacctggctcttcatcatgtcacaaggttgtggaggttgacgtccgtctgaccgacaacaacggccaacctttgacccattggatgaaaatacaggcctgtgtcatccaatctaggcccggggagcactttggaatgcttctttcggggccttttgtgcggttcgcgctctacactgctacatgcccagatgggcagggacttctctatgtttgtaatcacaagaaggagctaaggcagctgccagccatgccgggcgactttgtgccaaggggaccaccatttgtggctaccacccgtccagctccggatggtggagaaccaccctactttttactacaagagacgcaacgcatgagaccggcaacaatgcagccgccccaaattccgctaccagcgaagacaccagcgaggagagggagaagaaaggggaagggagggggcccttagtgtcgagtgttctgggatctgtacatggactcggctgtttcattttgacttgctctcttgttgattaggttctgcgtgttcctcactttcttggctttcatatcagacattttgttggattttatactggatttcatctttcattatactttcgttatatatctgctccaattgagacataaaatctcgcactgaactccctcaacacctctctccccttggatattgtggagatccaccaggctttgtagataaccaagccctttgaaaggctttctctcgaagacatcgcggcactcatttcctcaactagcatatcacacagtcttgtagtcagccggccttcgccgccttgggagggtacttcttcccatccttctcaacttgaggtgtacaggaacaccactcgcctttgggaattgagtccatcaccgaagggatatggcttccacagccccaccaggtgaccttgtctgtaataagtaagtactggtctgttgacacagagatgggtggaaactcactgcaggtcgagcaggtagccttcatacacatgatgagattggttttgtatattggttttagaaggaagatcgctgaagtgggaatgtcggaagatttggcttttatattcttttccctccgatattagtcatagccgttaggaccgcgggggaggggagttcgccgatgtctgaagcccgaatccccgatgtgtggtttctggggatttgattggagtttggcaatatgctgattaggagttcgaaatagataagcagaagcaggttattctacgaatgttcgaatgtagcctttataataggagtagaagtactccgtaaatgtttgaaaatctgcagattcttggtggggttatcgcccttccgtggcaacttcaactattttaactaccacacttctcaatcatgacggtcattgctgtggctggtggaactggtggagtgggcaaaactatcgttgagaaattgctggactccaacttcgacatcgtcgttctctctcgcactgtacgcaagcagagacactttccacctgagaaagtaactgacctccttaggtgaaacgggactttgcttcgcagaatattcaaaatgtccagataaactacgatgatattccctcaatggcacgcgtacttgagaaacacaatatccacaccattatatctgccattggtcttgtttctgacgagacaagccagtctcaattgaacttgatcgaagctgcggagaagtcggcaacaacgaaaagattcattcccagtgaatactcattcgtccaaaccaccgagtaggccggccagcttcagctgtatgttattctatgctgatattgaatcttctaagattactcccgattgaccctagcattcaatactggcttgatgcggcagatcgtctcaaagccagcggcttacaatatactaggataatccctggtttttttatggactattggggaatgccacatatccaaactcacctgcaacctttcacctttggtattgatatatctagcggcacagctgcgattccaggagacgggaacaacgtgatctgtatgacatacacgtacgacatggcgagttacttggtcaaggcacttgaccttgatgaatggcctgaattcagtgtaatcgttggagatgaaattacctacaatcagattctcggaatggcggaagaattcaccggtaagcatatcggacgcccttatttgagatacacccgcaacctaataattatatccgaaacaggcaggaaattcaaggtaacttacgatagcctggagcaaatcaaggccggtgatgtcaccgttcctctgcagccagagggaatagaatactcatcggacgaactcaaagaagtgactgcgttggtgagcagactcactgtcaataatgtctttcgactaccggatgatcgtctcaatactcggttcccagaggtgaagccaactacgatgagacaaatcctacacaatgcctggaacagaaatagcacataagttcatcaataccagcaagcttcagaactttgatttcatgaatgatcatttgtaataaaagtgcaaacagaagtcagaactcgaaaattatcctctcattacctccattgaagagtaggatcaaagccttcggtgatattatgcattcgtttctttgaactacaatagcagtaatccagacgtcaacctgattgtctagcagacaggcccgggacgctcgactgcaacacagacctgtcggcctggaatcagattcgagcaccaggggttaatgtcgtcgttccagcacagaagctggctcatggtgaacctattctggttccgcgcgatgatgtcccagcaggtctctccattactgacagtatagaactcggtacctgattttacgtcagtctagcttgagatagagggatttgttttagcttaactcacaatattgtgtcagctgccagccttggacggtattggtgttgacggcggcagatgtgccaagggaagcaattcccagaatgcataggagagatcggacaccgatggcaaccattgtgggctttggagatacgcttggacttattgactatatgtgtctggagactagcaatgggactgaagagtgttggtgattgaataaagaaaacttgaaagggattacttgttacttttatatgtgggatttactgagccgcaaagtactaaaggtcgaatgtcgggagtgatcttttgccttgccggacaagttcatatgacttgagaagtaccgtacctgcaaaataagcgggtaagggcatataatccagctataggttgcatttagattctgttgttgcaaccatagttgcaatgaggcgctgaaacaatgtgaacggcaacatcgcgaaattagccaatgggttcagtgggctggtcttcaccatggcttcgttcttttccattgattgatacatgtctcggcttgaccgatagaagtacgtcctgttttacggttacattgttttcagatatgattcctaaagggagagtaaccttggtccagggaggcctagtcgttatgcagataatagtgtgacaatgacctgagccataaccattcaccgggggtagagcaaaggtagcgcaaacagatacctaagacacagctgaatcgtgcgacaagattcaatagtcatggcggtcagtgagcaatcattctataggcgatgcatttagacttgattatggttcgcggctatttgctatggctagattgggttgttatacagagtaacaccccgttgcatcgccatgggtttgagcaaatagttctttgggatagctggtcctatgacagaattcggggaagaggttcgaaccatggaatttgacgagctcaagatattgctgatgcagatcaaagtacatcgacggaacctatgttagggagtacaaggtgtacaggatcacccaattgaatcaaatgtttatatcatattattgatggtctgatggtggtaaagggttattaccactctggtctgatctaacacagtgatatcatgccttctgctccagttctctagtttacctactgtggcactgattacctggggctgctttttcgaaatctaggaatagcatcagaaattggctgaccagaagagtgaggtctagattcatgactcgaaaaagaggttatttcgctatgcagaccgatgtgggaagtttgaaagtccaagttttccagaaagccaagatggttctaggccacttcttcggtaggccgttgatcctccccgatgaatatttcacagcgagtgcatttaatcagaaattccaatcatgcagttatctgcggcacaggctgtgactccgatgactaccgaggggaagtgttgaaaccgatttactagttgtacatcgtattggcctgaggcatatataatgactcagcatcagtgcctaaatgcctaaacgcttgaatcccaggagtcagtgggaacctcagctacaattctttatcctgatgattgcagccgattaggggttgcaagtctgaagcttttctttggtgatactatacaatcgttttgtatcatggatggaaacaccagcaacgttgtacgccttgccaaggtatcgactagcccccagatggcccttatggcccccatatattgagggaacgactgtgattggatgctgacctgcatacacaaacaaggcatgcagtatatgcagacggaagaaggtcaaatgtgatggaactcggccggtctgtgtcccctgcagaacattcgacttaccttgtaagtacgaggacaccgtgcgacggaagaaaaaactcaaccggtatgttctgcttggcttgttgattctaaattaaccatattgacttactcacggtgaggaacattttcatgagctggaacagcgcattcaatctttacaaggcgaattaaatcaaacacatgcgtccaagagacagcgactgctgagtgatgaggagacaggcccagagcatatccaaccgtcagaagcgtctgattcagagttaccatctccgagaaatgacaacgccccagcatcattcgaggccgaggccgatcgagacgatggcgatggagggtcatatacccttaaaactccgcaaggctcaatgcgattttttggtgagtattggctcgtcaactatccttcctcaacggtcgcacgaatggctgggctgattctaccgactatgcctaggtgcatcctctcatttttcaattgttgcccctgagggtgtgggctggcttgagagcaagacgggtaacaatgtatggcgccatgtcgctcagagaaacagcactcgatggagactagccgactggtatcctcgaactcttcaagatgatttgcaaagcagatgctcgcaacccttaccgtccaaggcggtcatcctagaccttattcgtgaatattttgacacgttcaacaaggccctacctcgaccctaatgtcccttctcatattaagcatggtgagtattatccagaaatctcccttaattcaaacgttcatcatcatgaaaccatatctgacctatgatatttgtagaattttggatgatcaatgccctaccagctggtcctcgcagtctaaaacacagcacgtctctttgtacgatgccagacgattttgaggctggatacggtggtgcacaagcggaagcagtcacgttaacagccgatcacactccgggtaaacctagctggattacattttgtgctggggtgtggtctgtgttgcaatttcagacgaaagtctggtatcaacctgcacagaaagcagcagttgtgaaaaacggtgaattcctttataatatgatacacaacacaccagagcgactcctcgcgcatgagttcacccacgggcatacccaatttggtgcttatcgtgcaagtaagtacttgaccatgcgacttccaacatatcggtctgctaatgaatggttctataaactgttttagtggataaagcgtatggctggggacctattgttgcgcttgctaaaaaagacaacgctcaaactgatgctacccagtcactggctgtcataaatgctggtacagtttcttttctgaaatattgacttgtgaatcttgctaattatctctagatactttcacatattggatcaatggtaagttgcagagatccttatggctccccaagacgacaggcgctagattgaactaaccaccgacggctaggtgtatacttggagatgtgcaacttccgtagcgggaggtgtgaagaccctgatgaagcagcaaaaacgccctaaaactcggactcttcctgactcactgtgtgcaagcaagtcttcctcgggcctcttcgcatgtgagtatctctgcttatttggtatccccggggcccagttttgatcttagagcatattcatctctgtgcctattcattctaacaagcaagcgaagtgttccagttgttccaaggttggaaacgttacatgtgactgttgtcccattcacgtatcttgatagtaaacttggaaccttttttcttggtatataatggagaaaatccgtaaagagaaagacatgcaacttctattaccttatattgattgaatcgaatgcagtgttaagactgtaatgatagagctaaattattcgcagaattattgagataaatgcaagctgacattttcctaatatcggtaacatccaaaagggcatccccaggtcggcttctttttccttttgcagtcacagtctaatctagtaaatgagccgctgtccttccctatcatcttgtcgaaccaatcctccatttctagcttccattagtaactacagagagtaaatagggaggtgccactaaccttcgtcttccttatactttataatgcgatcggccggacagcgagcaattggccttaaccgggaaatccaatcctttaacgaaatattggctttgcgaatatcaaaatccactttgcccctttgtttatctgtagtgtcgattctttcgaaatcataataattgccgtcacagataatatcttccagagagagtgtttctagagataactcgttccgtaaaatgtccaaaaagctgggcatagaagtgatcttttcttcgttgcgttcccatgccatcacggtttcccgggtgggacagacaaaacctccagctgtttcagatggctcatatgggtgatatgtagacatccactttctgctccaatattcttctgtcgacgcctcagaggaatcggaagtcgaggaaagctggggtgattggggtgcactttcggccgatgctgtttctgatgctggtaggactgataggggggctggtccatattcttgcggggacacagtcggtgtgtacggtgacgatgttgaaaatgatggcggtgttggttgaaatgacgggactgtaggtccatatgatggcaaggttggttgaaatgacgggactgtaggtccatatgatggcaaggttggttgataagatggcactgtgggtccatatgatggcaaggttggttggtatggtagcactgtaggttgatatgatggcgatgtatatcggacagatctttcattttcctggcggtcaggggactcagcatcttgcgatcgagggttttctgtggctcccgactcctcgctgcctattgtaacccgtctgactgtaagagtgaccagacttttcttaacactgagcaatagtgatctcaaagagctgaaattgatatcaagcttgtttatatgaagctttcggagtcgagtgaagccaatgtcatggaacatgtttccaacgtagccttttgccggataggcatgcatgtcatcttgaataagataaaaaggcatatgatcttgcgacaaggtcagtacttccagttgaggtccaagcttcctgaaaagtttcagccaagctgcctcattgagatcaatgcataaatgaagatcctcgaggtcttctaaagtagacagcagagaatctaattgctcttcggagagggcaatcctagggccgatatcataacagaatttagaatcgcaggtagacagctttcggggtctgcagcttgagccacataacgcaagaaaaagctttgataatgccaaggagtttagtttccgtatctgactagccttattggtacgcatagactcttgcaggctataaacatcgaatcgaaaatcgatctggctcatcatctgtcgcctgccgaggaacggaactgtctgctgccggggatcaagcaaaaattccgttctataa
